(19) United States
(12) Patent Application Publication
(10) Pub. No.: US 2007/0020327 A1
(43) Pub. Date: Jan. 25, 2007

(54) Inducing cellular immune responses to prostate cancer antigens using peptide and nucleic acid compositions

(76) Inventors: John Fikes, San Diego, CA (US); Alessandro Sette, La Jolla, CA (US); John Sidney, San Diego, CA (US); Scott Southwood, Santee, CA (US); Robert Chesnut, Cardiff-by-the-Sea, CA (US); Esteban Celis, Rochester, MN (US); Elissa Keogh, San Diego, CA (US)

Correspondence Address: STERNE, KESSLER, GOLDSTEIN & FOX PLLC, 1100 NEW YORK AVENUE, N.W., WASHINGTON, DC, 20005, US

(21) Appl. No.: 11/418,504

(22) Filed: May 5, 2006

Related U.S. Application Data
(62) Division of application No. 09/633,364, filed on Aug. 7, 2000, now abandoned.
Application No. 09/633,364 is a continuation-in-part of application No. 09/189,702, filed on Nov. 10, 1998.
(60) Provisional application No. 60/171,312, filed on Dec. 21, 1999.

(51) Int. Cl. A61K 39/395; A61K 35/14; A61K 9/127

(52) U.S. Cl. 424/450; 424/155.1; 424/178.1; 424/93.7

(57) ABSTRACT

This invention uses our knowledge of the mechanisms by which antigen is recognized by T cells to identify and prepare prostate cancer-associated antigen epitopes, and to develop epitope-based vaccines directed towards prostate tumors. More specifically, this application communicates our discovery of pharmaceutical compositions and methods of use in the prevention and treatment of cancer.

### CROSS-REFERENCES TO RELATED APPLICATIONS

[0001] This application claims priority to provisional application 60/171,312 filed Dec. 21, 1999. This application is related to U.S. Ser. No. 09/189,702, filed Nov. 10, 1998, which is a CIP of U.S. Ser. No. 08/205,713 filed Mar. 4, 1994, which is a CIP of abandoned U.S. Ser. No. 08/159,184 filed Nov. 29, 1993, which is a CIP of abandoned U.S. Ser. No. 08/073,205 filed Jun. 4, 1993 which is a CIP of abandoned U.S. Ser. No. 08/027,146 filed Mar. 5, 1993. The present application is also related to U.S. Ser. No. 09/226,775, which is a CIP of abandoned U.S. Ser. No. 08/815,396, which claims benefit of abandoned U.S. Ser. No. 60/013,113. Furthermore, the present application is related to U.S. Ser. No. 09/017,735, which is a CIP of abandoned U.S. Ser. No. 08/589,108; U.S. Ser. No. 08/454,033; and U.S. Ser. No. 08/349,177. The present application is also related to U.S. Ser. No. 09/017,524, U.S. Ser. No. 08/821,739, which claims benefit of abandoned U.S. Ser. No. 60/013,833; and U.S. Ser. No. 08/347,610, which is a CIP of U.S. Ser. No. 08/159,339, which is a CIP of abandoned U.S. Ser. No. 08/103,396, which is a CIP of abandoned U.S. Ser. No. 08/027,746, which is a CIP of abandoned U.S. Ser. No. 07/926,666. The present application is also related to U.S. Ser. No. 09/017,743, which is a CIP of abandoned U.S. Ser. No. 08/590,298; and U.S. Ser. No. 08/452,843, which is a CIP of U.S. Ser. No. 08/344,824, which is a CIP of abandoned U.S. Ser. No. 08/278,634. The present application is also related to PCT application 99/12066 filed May 28, 1999 which claims benefit of provisional U.S. Ser. No. 60/087,192, and U.S. Ser. No. 09/009,953, which is a CIP of abandoned U.S. Ser. No. 60/036,713 and abandoned U.S. Ser. No. 60/037,432. In addition, the present application is related to U.S. Ser. No. 09/098,584, U.S. Ser. No. 09/239,043, U.S. Ser. No. 60/117,486, U.S. Ser. No. 09/350,401, and U.S. Ser. No. 09/357,737. In addition, the present application is related to U.S. patent application entitled “Inducing Cellular Immune Responses to Carcinoembryonic Antigen Using Peptide and Nucleic Acid Compositions”, Attorney Docket No. 018623-014400, filed Dec. 10, 1999; U.S. patent application entitled “Inducing Cellular Immune Responses to p53 Using Peptide and Nucleic Acid Compositions”; Attorney Docket No. 018623-014500, filed Dec. 10, 1999; U.S. patent application entitled “Inducing Cellular Immune Responses to MAGE2/3 Using Peptide and Nucleic Acid Compositions”, Attorney Docket No. 018623-014600, filed Dec. 10, 1999; and U.S. patent application entitled “Inducing Cellular Immune Responses to HER2/neu Using Peptide and Nucleic Acid Compositions”, Attorney Docket No. 018623-014800, filed Dec. 10, 1999. All of the above applications are incorporated herein by reference.

### FEDERALLY SPONSORED RESEARCH AND DEVELOPMENT

[0002] This invention was funded, in part, by the United States government under grants with the National Institutes of Health. The U.S. government has certain rights in this invention.

### INDEX

[0003] I. Background of the Invention
[0004] II. Summary of the Invention
[0005] III. Brief Description of the Figures
[0006] IV. Detailed Description of the Invention
   [0007] A. Definitions
   [0008] B. Stimulation of CTL and HTL responses
   [0009] C. Binding Affinity of Peptide Epitopes for HLA Molecules
   [0010] D. Peptide Epitope Binding Motifs and Supermotifs
      [0011] 1. HLA-A1 supermotif
      [0012] 2. HLA-A2 supermotif
      [0013] 3. HLA-A3 supermotif
      [0014] 4. HLA-A24 supermotif
      [0015] 5. HLA-B7 supermotif
      [0016] 6. HLA-B27 supermotif
      [0017] 7. HLA-B44 supermotif
      [0018] 8. HLA-B58 supermotif
      [0019] 9. HLA-B62 supermotif
      [0020] 10. HLA-A1 motif
      [0021] 11. HLA-A2.1 motif
      [0022] 12. HLA-A3 motif
      [0023] 13. HLA-A11 motif
      [0024] 14. HLA-A24 motif
      [0025] 15. HLA-DR-1-4-7 supermotif
      [0026] 16. HLA-DR3 motifs
   [0027] E. Enhancing Population Coverage of the Vaccine
   [0028] F. Immune Response-Stimulating Peptide Epitope Analogs
   [0029] G. Computer Screening of Protein Sequences from Disease-Related Antigens for Supermotif- or Motif-Containing Epitopes
   [0030] H. Preparation of Peptide Epitopes
   [0031] I. Assays to Detect T-Cell Responses
   [0032] J. Use of Peptide Epitopes for Evaluating Immune Responses
   [0033] K. Vaccine Compositions
      [0034] 1. Minigene Vaccines
      [0035] 2. Combinations of CTL Peptides with Helper Peptides
      [0036] 3. Combinations of CTL Peptides with T Cell Priming Agents
      [0037] 4. Vaccine Compositions Comprising Dendritic Cells Pulsed with CTL and/or HTL Peptides
   [0038] L. Administration of Vaccines for Therapeutic or Prophylactic Purposes
   [0039] M. Kits
[0040] V. Examples
[0041] VI. Claims
[0042] VII. Abstract

### I. BACKGROUND OF THE INVENTION

[0043] A growing body of evidence suggests that cytotoxic T lymphocytes (CTL) are important in the immune response to tumor cells. CTL recognize peptide epitopes in the context of HLA class I molecules that are expressed on the surface of almost all nucleated cells. Following intracellular processing of endogenously synthesized tumor antigens, antigen-derived peptide epitopes bind to class I HLA molecules in the endoplasmic reticulum, and the resulting complex is then transported to the cell surface. CTL recognize the peptide-HLA class I complex, which then results in the destruction of the cell bearing the HLA-peptide complex directly by the CTL and/or via the activation of non-destructive mechanisms, e.g., activation of lymphokines such as tumor necrosis factor-α (TNF-α) or interferon-γ (IFNγ) which enhance the immune response and facilitate the destruction of the tumor cell.

[0044] Tumor-specific helper T lymphocytes (HTLs) are also known to be important for maintaining effective antitumor immunity. Their role in antitumor immunity has been demonstrated in animal models in which these cells not only serve to provide help for induction of CTL and antibody responses, but also provide effector functions, which are mediated by direct cell contact and also by secretion of lymphokines (e.g., IFNγ and TNF-α).

[0045] A fundamental challenge in the development of an efficacious tumor vaccine is immune suppression or tolerance that can occur. There is therefore a need to establish vaccine embodiments that elicit immune responses of sufficient breadth and vigor to prevent progression and/or clear the tumor.

[0046] The epitope approach, as we have described, represents a solution to this challenge, in that it allows the incorporation of various CTL, HTL, and antibody (if desired) epitopes from discrete regions of one or more target tumor-associated antigens (TAAs) in a single vaccine composition. Such a composition may simultaneously target multiple dominant and subdominant epitopes and thereby be used to achieve effective immunization in a diverse population.

[0047] Prostate cancer is the most common malignancy in men. Current therapies, i.e., chemotherapy combined with androgen blockade, antiandrogen withdrawal, and other secondary hormonal therapies, have met with limited success. Thus, there is a need to develop more efficacious therapies. The multiepitopic immunotherapy vaccine compositions of the present invention fulfill this need.

[0048] Antigens that are associated with prostate cancer include, but are not limited to, prostate specific antigen (PSA), prostate specific membrane antigen (PSM), prostatic acid phosphatase (PAP), and human kallikrein2 (hK2 or HuK2). These antigens represent important antigen targets for the polyepitopic vaccine compositions of the invention.

[0049] PSM is also an important candidate for prostate cancer therapy. It is a Type II membrane protein that is expressed at high levels on prostate adenocarcinomas. The levels of expression increase on metastases and in carcinomas that are refractory to hormone therapy. PSM is not generally present on normal tissues, although low levels have been detected in the colonic crypts and in the duodenum, and PSM can be detected in normal male serum and seminal fluid (see, e.g., Silver et al., Clin. Cancer Res. 3:81-85, 1997). CTL responses to PSM have also been documented (see, e.g., Murphy-et al., Prostate 29:371-380, 1996; and Salgaller et al., Prostate 35:144-151, 1998).

[0050] PAP is a tissue-specific differentiation antigen that is secreted exclusively by cells in the prostate (see, e.g., Lam et al., Prostate 15:13-21, 1989). It can be detected in serum and levels are increased in patients with prostate carcinoma (see, e.g., Jacobs et al., Curr. Probl. Cancer 15:299-360, 1991). The PAP protein sequence has, at best, a 49% sequence homology with other acid phosphatases with the homologous regions distributed throughout the protein. Accordingly, PAP-specific epitopes can be identified and several different CTL epitopes have been described (see, e.g., Peshwa et al., Prostate 36:129-138, 1998).

[0051] The hK2 protein is functionally a serine protease involved in posttranslational processing of polypeptides. It is expressed by prostate epithelia exclusively, and is found in both benign and malignant prostate cancer tissue. Although it is expressed in 50% of normal prostate cells, the percentage of cells expressing hK2 is increased in adenocarcinomas and prostatic intraepithelial neoplasia (PIN) (see, e.g., Darson et al., Urology 49:857-862, 1997). Based on the preferential expression of this antigen on prostate cancer cells, hK2 is also an important target for immunotherapy.

[0052] Prostate-specific antigen (PSA), also referred to as hK3, is a secreted serine protease and a member of the kallikrein family of proteins. The PSA gene is 80% homologous with the hK2 gene, however, tissue expression of hK2 is regulated independently of PSA (see, e.g., Darson et al., Urology 49:857-862, 1997). Expression of PSA is restricted to prostate epithelial cells, both benign and malignant. The antigen can be detected in the serum of most prostate cancer patients and in seminal plasma. Several T cell epitopes from PSA have been identified and have been found to be immunogenic, and antibody responses have been reported in patients (see, e.g., Correale et al., J. Immunol. 161:3186, 1998; and Alexander et al., Urology 51:150-157, 1998). Thus, based on its prostate-restricted expression and ability to stimulate immune responses, PSA is an attractive target for immunotherapy of prostate cancer.

[0053] The information provided in this section is intended to disclose the presently understood state of the art as of the filing date of the present application. Information is included in this section which was generated subsequent to the priority date of this application. Accordingly, information in this section is not intended, in any way, to delineate the priority date for the invention.

### II. SUMMARY OF THE INVENTION

[0054] This invention applies our knowledge of the mechanisms by which antigen is recognized by T cells, for example, to develop epitope-based vaccines directed towards TAAs. More specifically, this application identifies epitopes for inclusion in diagnostic and/or pharmaceutical compositions and methods of use of the epitopes for the evaluation of immune responses and for the treatment and/or prevention of cancer.

[0055] The use of epitope-based vaccines has several advantages over current vaccines, particularly when compared to the use of whole antigens in vaccine compositions. For example, immunosuppressive epitopes that may be present in whole antigens can be avoided with the use of epitope-based vaccines. Such immunosuppressive epitopes may, e.g., correspond to immunodominant epitopes in whole antigens, which may be avoided by selecting peptide epitopes from non-dominant regions (see, e.g., Disis et al., J. Immunol. 156:3151-3158, 1996).

[0056] An additional advantage of an epitope-based vaccine approach is the ability to combine selected epitopes (CTL and HTL), and further, to modify the composition of the epitopes, achieving, for example, enhanced immunogenicity. Accordingly, the immune response can be modulated, as appropriate, for the target disease. Similar engineering of the response is not possible with traditional approaches.

[0057] Another major benefit of epitope-based immune-stimulating vaccines is their safety. The possible pathological side effects caused by infectious agents or whole protein antigens, which might have their own intrinsic biological activity, is eliminated.

[0058] An epitope-based vaccine also provides the ability to direct and focus an immune response to multiple selected antigens from the same pathogen (a “pathogen” may be an infectious agent or a tumor-associated molecule). Thus, patient-by-patient variability in the immune response to a particular pathogen may be alleviated by inclusion of epitopes from multiple antigens from the pathogen in a vaccine composition.

[0059] Furthermore, an epitope-based anti-tumor vaccine also provides the opportunity to combine epitopes derived from multiple tumor-associated molecules. This capability can therefore address the problem of tumor-to tumor variability that arises when developing a broadly targeted anti-tumor vaccine for a given tumor type and can also reduce the likelihood of tumor escape due to antigen loss. For example, prostate cancer cells in one patient may express target TAAs that differ from the prostate cancer cells in another patient. Epitopes derived from multiple TAAs can be included in a polyepitopic vaccine that will target both prostate cancers.

[0060] One of the most formidable obstacles to the development of broadly efficacious epitope-based immunotherapeutics, however, has been the extreme polymorphism of HLA molecules. To date, effective non-genetically biased coverage of a population has been a task of considerable complexity; such coverage has required that epitopes be used that are specific for HLA molecules corresponding to each individual HLA allele. Impractically large numbers of epitopes would therefore have to be used in order to cover ethnically diverse populations. Thus, there has existed a need for peptide epitopes that are bound by multiple HLA antigen molecules for use in epitope-based vaccines. The greater the number of HLA antigen molecules bound, the greater the breadth of population coverage by the vaccine.

[0061] Furthermore, as described herein in greater detail, a need has existed to modulate peptide binding properties, e.g., so that peptides that are able to bind to multiple HLA molecules do so with an affinity that will stimulate an immune response. Identification of epitopes restricted by more than one HLA allele at an affinity that correlates with immunogenicity is important to provide thorough population coverage, and to allow the elicitation of responses of sufficient vigor to prevent or clear an infection in a diverse segment of the population. Such a response can also target a broad array of epitopes. The technology disclosed herein provides for such favored immune responses.

[0062] In a preferred embodiment, epitopes for inclusion in vaccine compositions of the invention are selected by a process whereby protein sequences of known antigens are evaluated for the presence of motif or supermotif-bearing epitopes. Peptides corresponding to a motif- or supermotif-bearing epitope are then synthesized and tested for the ability to bind to the HLA molecule that recognizes the selected motif. Those peptides that bind at an intermediate or high affinity i.e., an IC₅₀ (or a K_{D} value) of about 500 nM or less for HLA class I molecules or an IC₅₀ of about 1000 nM or less for HLA class II molecules, are further evaluated for their ability to induce a CTL or HTL response. Immunogenic peptide epitopes are selected for inclusion in vaccine compositions.

[0063] Supermotif-bearing peptides may additionally be tested for the ability to bind to multiple alleles within the HLA supertype family. Moreover, peptide epitopes may be analoged to modify binding affinity and/or the ability to bind to multiple alleles within an HLA supertype.

[0064] The invention also includes embodiments comprising methods for monitoring or evaluating an immune response to a TAA in a patient having a known HLA-type. Such methods comprise incubating a T lymphocyte sample from the patient with a peptide composition comprising a TAA epitope that has an amino acid sequence comprising a supermotif or motif and which binds the product of at least one HLA allele present in the patient, and detecting for the presence of a T lymphocyte that binds to the peptide. A CTL peptide epitope may, for example, be used as a component of a tetrameric complex for this type of analysis.

[0065] An alternative modality for defining the peptide epitopes in accordance with the invention is to recite the physical properties, such as length; primary structure; or charge, which are correlated with binding to a particular allele-specific HLA molecule or group of allele-specific HLA molecules. A further modality for defining peptide epitopes is to recite the physical properties of an HLA binding pocket, or properties shared by several allele-specific HLA binding pockets (e.g. pocket configuration and charge distribution) and reciting that the peptide epitope fits and binds to the pocket or pockets.

[0066] As will be apparent from the discussion below, other methods and embodiments are also contemplated. Further, novel synthetic peptides produced by any of the methods described herein are also part of the invention.

### III. BRIEF DESCRIPTION OF THE FIGURES

[0067] not applicable

### IV. DETAILED DESCRIPTION OF THE INVENTION

[0068] The peptide epitopes and corresponding nucleic acid compositions of the present invention are useful for stimulating an immune response to a TAA by stimulating the production of CTL or HTL responses. The peptide epitopes, which are derived directly or indirectly from native TAA protein amino acid sequences, are able to bind to HLA molecules and stimulate an immune response to the TAA. The complete sequence of the TAA proteins to be analyzed can be obtained from GenBank. Peptide epitopes and analogs thereof can also be readily determined from sequence information that may subsequently be discovered for heretofore unknown variants of particular TAAs, as will be clear from the disclosure provided below.

[0069] A list of target TAAs includes, but is not limited to, the following antigens: MAGE 1, MAGE 2, MAGE 3, MAGE-11, MAGE-A10, BAGE, GAGE, RAGE, MAGE-C1, LAGE-1, CAG-3, DAM, MUC1, MUC2, MUC18, NY-ESO-1, MUM-1, CDK4, BRCA2, NY-LU-1, NY-LU-7, NY-LU-12, CASP8, RAS, KIAA-2-5, SCCs, p53, p73, CEA, Her 2/neu, Melan-A, gp100, tyrosinase, TRP2, gp75/TRP1, kallikrein, PSM, PAP, PSA, PT1-1, B-catenin, PRAME, Telomerase, FAK, cyclin D1 protein, NOEY2, EGF-R, SART-1, CAPB, HPVE7, p5, Folate receptor CDC27, PAGE-1, and PAGE-4. Epitopes derived from these antigens may be used in combination with one another to target a specific tumor type, e.g., prostate tumors, or to target multiple types of tumors.

[0070] The peptide epitopes of the invention have been identified in a number of ways, as will be discussed below. Also discussed in greater detail is that analog peptides have been derived and the binding activity for HLA molecules modulated by modifying specific amino acid residues to create peptide analogs exhibiting altered immunogenicity. Further, the present invention provides compositions and combinations of compositions that enable epitope-based vaccines that are capable of interacting with HLA molecules encoded by various genetic alleles to provide broader population coverage than prior vaccines.

IV.A. Definitions

[0071] The invention can be better understood with reference to the following definitions, which are listed alphabetically:

[0072] A “construct” as used herein generally denotes a composition that does not occur in nature. A construct can be produced by synthetic technologies, e.g., recombinant DNA preparation and expression or chemical synthetic techniques for nucleic or amino acids. A construct can also be produced by the addition or affiliation of one material with another such that the result is not found in nature in that form.

[0073] A “computer” or “computer system” generally includes: a processor; at least one information storage/retrieval apparatus such as, for example, a hard drive, a disk drive or a tape drive; at least one input apparatus such as, for example, a keyboard, a mouse, a touch screen, or a microphone; and display structure. Additionally, the computer may include a communication channel in communication with a network. Such a computer may include more or less than what is listed above.

[0074] “Cross-reactive binding” indicates that a peptide is bound by more than one HLA molecule; a synonym is degenerate binding.

[0075] A “cryptic epitope” elicits a response by immunization with an isolated peptide, but the response is not cross-reactive in vitro when intact whole protein which comprises the epitope is used as an antigen.

[0076] A “dominant epitope” is an epitope that induces an immune response upon immunization with a whole native antigen (see, e.g., Sercarz, et al., Annu. Rev. Immunol. 11:729-766, 1993). Such a response is cross-reactive in vitro with an isolated peptide epitope.

[0077] With regard to a particular amino acid sequence, an “epitope” is a set of amino acid residues which is involved in recognition by a particular immunoglobulin, or in the context of T cells, those residues necessary for recognition by T cell receptor proteins and/or Major Histocompatibility Complex (MHC) receptors. In an immune system setting, in vivo or in vitro, an epitope is the collective features of a molecule, such as primary, secondary and tertiary peptide structure, and charge, that together form a site recognized by an immunoglobulin, T cell receptor or HLA molecule. Throughout this disclosure epitope and peptide are often used interchangeably.

[0078] It is to be appreciated that protein or peptide molecules that comprise an epitope of the invention as well as additional amino acid(s) are within the bounds of the invention. In certain embodiments, there is a limitation on the length of a peptide of the invention which is not otherwise a construct as defined herein. An embodiment that is length-limited occurs when the protein/peptide comprising an epitope of the invention comprises a region (i.e., a contiguous series of amino acids) having 100% identity with a native sequence. In order to avoid a recited definition of epitope from reading, e.g., on whole natural molecules, the length of any region that has 100% identity with a native peptide sequence is limited. Thus, for a peptide comprising an epitope of the invention and a region with 100% identity with a native peptide sequence (and which is not otherwise a construct), the region with 100% identity to a native sequence generally has a length of: less than or equal to 600 amino acids, often less than or equal to 500 amino acids, often less than or equal to 400 amino acids, often less than or equal to 250 amino acids, often less than or equal to 100 amino acids, often less than or equal to 85 amino acids, often less than or equal to 75 amino acids, often less than or equal to 65 amino acids, and often less than or equal to 50 amino acids. In certain embodiments, an “epitope” of the invention which is not a construct is comprised by a peptide having a region with less than 51 amino acids that has 100% identity to a native peptide sequence, in any increment of (50, 49, 48, 47, 46, 45, 44, 43, 42, 41, 40, 39, 38, 37, 36, 35, 34, 33, 32, 31, 30, 29, 28, 27, 26, 25, 24, 23, 22, 21, 20, 19, 18, 17, 16, 15, 14, 13, 12, 11, 10, 9, 8, 7, 6, 5) down to 5 amino acids.

[0079] Certain peptide or protein sequences longer than 600 amino acids are within the scope of the invention. Such longer sequences are within the scope of the invention so long as they do not comprise any contiguous sequence of more than 600 amino acids that have 100% identity with a native peptide sequence, or if longer than 600 amino acids, they are a construct. For any peptide that has five contiguous residues or less that correspond to a native sequence, there is no limitation on the maximal length of that peptide in order to fall within the scope of the invention. It is presently preferred that a CTL epitope of the invention be less than 600 residues long in any increment down to eight amino acid residues.

[0080] “Human Leukocyte Antigen” or “HLA” is a human class I or class II Major Histocompatibility Complex (MHC) protein (see, e.g., Stites, et al., IMMUNOLOGY, 8^{TH} ED., Lange Publishing, Los Altos, Calif., 1994).

[0081] An “HLA supertype or family”, as used herein, describes sets of HLA molecules grouped on the basis of shared peptide-binding specificities. HLA class I molecules that share somewhat similar binding affinity for peptides bearing certain amino acid motifs are grouped into HLA supertypes. The terms HLA superfamily, HLA supertype family, HLA family, and HLA xx-like molecules (where xx denotes a particular HLA type), are synonyms.

[0082] Throughout this disclosure, results are expressed in terms of “IC₅₀'s.” IC₅₀ is the concentration of peptide in a binding assay at which 50% inhibition of binding of a reference peptide is observed. Given the conditions in which the assays are run (i.e., limiting HLA proteins and labeled peptide concentrations), these values approximate K_{D} values. Assays for determining binding are described in detail, e.g., in PCT publications WO 94/20127 and WO 94/03205. It should be noted that IC₅₀ values can change, often dramatically, if the assay conditions are varied, and depending on the particular reagents used (e.g., HLA preparation, etc.). For example, excessive concentrations of HLA molecules will increase the apparent measured IC₅₀ of a given ligand.

[0083] Alternatively, binding is expressed relative to a reference peptide. Although as a particular assay becomes more, or less, sensitive, the IC₅₀'s of the peptides tested may change somewhat, the binding relative to the reference peptide will not significantly change. For example, in an assay run under conditions such that the IC₅₀ of the reference peptide increases 10-fold, the IC₅₀ values of the test peptides will also shift approximately 10-fold. Therefore, to avoid ambiguities, the assessment of whether a peptide is a good, intermediate, weak, or negative binder is generally based on its IC₅₀, relative to the IC₅₀ of a standard peptide.

[0084] Binding may also be determined using other assay systems including those using: live cells (e.g., Ceppellini et al., Nature 339:392, 1989; Christnick et al., Nature 352:67, 1991; Busch et al., Int. Immunol. 2:443, 19990; Hill et al., J. Immunol. 147:189, 1991; del Guercio et al., J. Immunol. 154:685, 1995), cell free systems using detergent lysates (e.g., Cerundolo et al., J. Immunol. 21:2069, 1991), immobilized purified MHC (e.g., Hill et al., J. Immunol. 152, 2890, 1994; Marshall et al., J. Immunol. 152:4946, 1994), ELISA systems (e.g., Reay et al., EMBO J. 11:2829, 1992), surface plasmon resonance (e.g., Khilko et al., J. Biol. Chem. 268:15425, 1993); high flux soluble phase assays (Hammer et al., J. Exp. Med. 180:2353, 1994), and measurement of class I MHC stabilization or assembly (e.g., Ljunggren et al., Nature 346:476, 1990; Schumacher et al., Cell 62:563, 1990; Townsend et al., Cell 62:285, 1990; Parker et al., J. Immunol. 149:1896, 1992).

[0085] As used herein, “high affinity” with respect to HLA class I molecules is defined as binding with an IC₅₀, or K_{D} value, of 50 nM or less; “intermediate affinity” is binding with an IC₅₀ or K_{D} value of between about 50 and about 500 nM. “High affinity” with respect to binding to HLA class II molecules is defined as binding with an IC₅₀ or K_{D} value of 100 nM or less; “intermediate affinity” is binding with an IC₅₀ or K_{D} value of between about 100 and about 1000 nM.

[0086] The terms “identical” or percent “identity,” in the context of two or more peptide sequences, refer to two or more sequences or subsequences that are the same or have a specified percentage of amino acid residues that are the same, when compared and aligned for maximum correspondence over a comparison window, as measured using a sequence comparison algorithm or by manual alignment and visual inspection.

[0087] An “immunogenic peptide” or “peptide epitope” is a peptide that comprises an allele-specific motif or supermotif such that the peptide will bind an HLA molecule and induce a CTL and/or HTL response. Thus, immunogenic peptides of the invention are capable of binding to an appropriate HLA molecule and thereafter inducing an HLA-restricted cytotoxic or helper T cell response to the antigen from which the immunogenic peptide is derived.

[0088] The phrases “isolated” or “biologically pure” refer to material which is substantially or essentially free from components which normally accompany the material as it is found in its native state. Thus, isolated peptides in accordance with the invention preferably do not contain materials normally associated with the peptides in their in situ environment.

[0089] “Link” or “join” refers to any method known in the art for functionally connecting peptides, including, without limitation, recombinant fusion, covalent bonding, disulfide bonding, ionic bonding, hydrogen bonding, and electrostatic bonding.

[0090] “Major Histocompatibility Complex” or “MHC” is a cluster of genes that plays a role in control of the cellular interactions responsible for physiologic immune responses. In humans, the MHC complex is also known as the HLA complex. For a detailed description of the MHC and HLA complexes, see, Paul, FUNDAMENTAL IMMUNOLOGY, 3^{RD} ED., Raven Press, New York, 1993.

[0091] The term “motif” refers to the pattern of residues in a peptide of defined length, usually a peptide of from about 8 to about 13 amino acids, often 8 to 11 amino acids, for a class I HLA motif and from about 6 to about 25 amino acids for a class II HLA motif, which is recognized by a particular HLA molecule. Peptide motifs are typically different for each protein encoded by each human HLA allele and differ in the pattern of the primary and secondary anchor residues.

[0092] A “negative binding residue” or “deleterious residue” is an amino acid which, if present at certain positions (typically not primary anchor positions) in a peptide epitope, results in decreased binding affinity of the peptide for the peptide's corresponding HLA molecule.

[0093] A “non-native” sequence or “construct” refers to a sequence that is not found in nature, i.e., is “non-naturally occurring”. Such sequences include, e.g., peptides that are lipidated or otherwise modified, and polyepitopic compositions that contain epitopes that are not contiguous in a native protein sequence.

[0094] The term “peptide” is used interchangeably with “oligopeptide” in the present specification to designate a series of residues, typically L-amino acids, connected one to the other, typically by peptide bonds between the α-amino and carboxyl groups of adjacent amino acids. CTL-inducing peptides of the invention are often 13 residues or less in length and usually consist of between about 8 and about 11 residues, preferably 9 or 10 residues. HTL-inducing oligopeptides are often less than about 50 residues in length and usually consist of between about 6 and about 30 residues, more usually between about 12 and 25, and often between about 15 and 20 residues.

[0095] “Pharmaceutically acceptable” refers to a generally non-toxic, inert, and/or physiologically compatible composition.

[0096] A “pharmaceutical excipient” comprises a material such as an adjuvant, a carrier, pH-adjusting and buffering agents, tonicity adjusting agents, wetting agents, preservative, and the like.

[0097] A “primary anchor residue” is an amino acid at a specific position along a peptide sequence which is understood to provide a contact point between the immunogenic peptide and the HLA molecule. One to three, usually two, primary anchor residues within a peptide of defined length generally defines a “motif” for an immunogenic peptide. These residues are understood to fit in close contact with peptide binding grooves of an HLA molecule, with their side chains buried in specific pockets of the binding grooves themselves. In one embodiment, for example, the primary anchor residues are located at position 2 (from the amino terminal position) and at the carboxyl terminal position of a 9-residue peptide epitope in accordance with the invention. The primary anchor positions for each motif and supermotif are set forth in Table I. For example, analog peptides can be created by altering the presence or absence of particular residues in these primary anchor positions. Such analogs are used to modulate the binding affinity of a peptide comprising a particular motif or supermotif.

[0098] “Promiscuous recognition” is where a distinct peptide is recognized by the same T cell clone in the context of various HLA molecules. Promiscuous recognition or binding is synonymous with cross-reactive binding.

[0099] A “protective immune response” or “therapeutic immune response” refers to a CTL and/or an HTL response to an antigen derived from an infectious agent or a tumor antigen, which prevents or at least partially arrests disease symptoms or progression. The immune response may also include an antibody response which has been facilitated by the stimulation of helper T cells.

[0100] The term “residue” refers to an amino acid or amino acid mimetic incorporated into an oligopeptide by an amide bond or amide bond mimetic.

[0101] A “secondary anchor residue” is an amino acid at a position other than a primary anchor position in a peptide which may influence peptide binding. A secondary anchor residue occurs at a significantly higher frequency amongst bound peptides than would be expected by random distribution of amino acids at one position. The secondary anchor residues are said to occur at “secondary anchor positions.” A secondary anchor residue can be identified as a residue which is present at a higher frequency among high or intermediate affinity binding peptides, or a residue otherwise associated with high or intermediate affinity binding. For example, analog peptides can be created by altering the presence or absence of particular residues in these secondary anchor positions. Such analogs are used to finely modulate the binding affinity of a peptide comprising a particular motif or supermotif.

[0102] A “subdominant epitope” is an epitope which evokes little or no response upon immunization with whole antigens which comprise the epitope, but for which a response can be obtained by immunization with an isolated peptide, and this response (unlike the case of cryptic epitopes) is detected when whole protein is used to recall the response in vitro or in vivo.

[0103] A “supermotif” is a peptide binding specificity shared by HLA molecules encoded by two or more HLA alleles. Preferably, a supermotif-bearing peptide is recognized with high or intermediate affinity (as defined herein) by two or more HLA molecules.

[0104] “Synthetic peptide” refers to a peptide that is man-made using such methods as chemical synthesis or recombinant DNA technology.

[0105] As used herein, a “vaccine” is a composition that contains one or more peptides of the invention. There are numerous embodiments of vaccines in accordance with the invention, such as by a cocktail of one or more peptides; one or more epitopes of the invention comprised by a polyepitopic peptide; or nucleic acids that encode such peptides or polypeptides, e.g., a minigene that encodes a polyepitopic peptide. The “one or more peptides” can include any whole unit integer from 1-150, e.g., at least 2, 3, 4, 5, 6, 7, 8, 9, 10, 11, 12, 13, 14, 15, 16, 17, 18, 19, 20, 21, 22, 23, 24, 25, 26, 27, 28, 29, 30, 31, 32, 33, 34, 35, 36, 37, 38, 39, 40, 45, 50, 55, 60, 65, 70, 75, 80, 85, 90, 95, 100, 105, 110, 115, 120, 125, 130, 135, 140, 145, or 150 or more peptides of the invention. The peptides or polypeptides can optionally be modified, such as by lipidation, addition of targeting or other sequences. HLA class I-binding peptides of the invention can be admixed with, or linked to, HLA class II-binding peptides, to facilitate activation of both cytotoxic T lymphocytes and helper T lymphocytes. Vaccines can also comprise peptide-pulsed antigen presenting cells, e.g., dendritic cells.

[0106] The nomenclature used to describe peptide compounds follows the conventional practice wherein the amino group is presented to the left (the N-terminus) and the carboxyl group to the right (the C-terminus) of each amino acid residue. When amino acid residue positions are referred to in a peptide epitope they are numbered in an amino to carboxyl direction with position one being the position closest to the amino terminal end of the epitope, or the peptide or protein of which it may be a part. In the formulae representing selected specific embodiments of the present invention, the amino- and carboxyl-terminal groups, although not specifically shown, are in the form they would assume at physiologic pH values, unless otherwise specified. In the amino acid structure formulae, each residue is generally represented by standard three letter or single letter designations. The L-form of an amino acid residue is represented by a capital single letter or a capital first letter of a three-letter symbol, and the D-form for those amino acids having D-forms is represented by a lower case single letter or a lower case three letter symbol. Glycine has no asymmetric carbon atom and is simply referred to as “Gly” or G. Symbols for the amino acids are shown below. In addition to these symbols, “B” in the single letter abbreviations used herein designates α-amino butyric acid.

| Single Letter Symbol | Three Letter Symbol | Amino Acids |
|---|---|---|
| A | Ala | Alanine |
| C | Cys | Cysteine |
| D | Asp | Aspartic Acid |
| E | Glu | Glutamic Acid |
| F | Phe | Phenylalanine |
| G | Gly | Glycine |
| H | His | Histidine |
| I | Ile | Isoleucine |
| K | Lys | Lysine |
| L | Leu | Leucine |
| M | Met | Methionine |
| N | Asn | Asparagine |
| P | Pro | Proline |
| Q | Gln | Glutamine |
| R | Arg | Arginine |
| S | Ser | Serine |
| T | Thr | Threonine |
| V | Val | Valine |
| W | Trp | Tryptophan |
| Y | Tyr | Tyrosine |

IV.B. Stimulation of CTL and HTL Responses

[0107] The mechanism by which T cells recognize antigens has been delineated during the past ten years. Based on our understanding of the immune system we have developed efficacious peptide epitope vaccine compositions that can induce a therapeutic or prophylactic immune response to a TAA in a broad population. For an understanding of the value and efficacy of the claimed compositions, a brief review of immunology-related technology is provided.

[0108] A complex of an HLA molecule and a peptidic antigen acts as the ligand recognized by HLA-restricted T cells (Buus, S. et al., Cell 47:1071, 1986; Babbitt, B. P. et al., Nature 317:359, 1985; Townsend, A. and Bodmer, H., Annu. Rev. Immunol. 7:601, 1989; Germain, R. N., Annu. Rev. Immunol. 11:403, 1993). Through the study of single amino acid substituted antigen analogs and the sequencing of endogenously bound, naturally processed peptides, critical residues that correspond to motifs required for specific binding to HLA antigen molecules have been identified and are described herein and are set forth in Tables I, II, and III (see also, e.g., Southwood, et al., J. Immunol. 160:3363, 1998; Rammensee, et al., Immunogenetics 41:178, 1995; Rammensee et al., SYFPEITHI, access via web at :http://134.2.96.221/scripts.hlaserver.dll/home.htm; Sette, A. and Sidney, J. Curr. Opin. Immunol. 10:478, 1998; Engelhard, V. H., Curr. Opin. Immunol. 6:13, 1994; Sette, A. and Grey, H. M., Curr. Opin. Immunol. 4:79, 1992; Sinigaglia, F. and Hammer, J. Curr. Biol. 6:52, 1994; Ruppert et al., Cell 74:929-937, 1993; Kondo et al., J. Immunol. 155:4307-4312, 1995; Sidney et al., J. Immunol. 157:3480-3490, 1996; Sidney et al., Human Immunol. 45:79-93, 1996; Sette, A. and Sidney, J. Immunogenetics, in press, 1999).

[0109] Furthermore, x-ray crystallographic analysis of HLA-peptide complexes has revealed pockets within the peptide binding cleft of HLA molecules which accommodate, in an allele-specific mode, residues borne by peptide ligands; these residues in turn determine the HLA binding capacity of the peptides in which they are present. (See, e.g., Madden, D. R. Annu. Rev. Immunol. 13:587, 1995; Smith, et al., Immunity 4:203, 1996; Fremont et al., Immunity 8:305, 1998; Stem et al., Structure 2:245, 1994; Jones, E. Y. Curr. Opin. Immunol. 9:75, 1997; Brown, J. H. et al., Nature 364:33, 1993; Guo, H. C. et al., Proc. Natl. Acad. Sci. USA 90:8053, 1993; Guo, H. C. et al., Nature 360:364, 1992; Silver, M. L. et al., Nature 360:367, 1992; Matsumura, M. et al., Science 257:927, 1992; Madden et al., Cell 70:1035, 1992; Fremont, D. H. et al., Science 257:919, 1992; Saper, M. A., Bjorkman, P. J. and Wiley, D. C., J. Mol. Biol. 219:277, 1991.)

[0110] Accordingly, the definition of class I and class II allele-specific HLA binding motifs, or class I or class II supermotifs allows identification of regions within a protein that have the potential of binding particular HLA molecules.

[0111] The present inventors have found that the correlation of binding affinity with immunogenicity, which is disclosed herein, is an important factor to be considered when evaluating candidate peptides. Thus, by a combination of motif searches and HLA-peptide binding assays, candidates for epitope-based vaccines have been identified. After determining their binding affinity, additional confirmatory work can be performed to select, amongst these vaccine candidates, epitopes with preferred characteristics in terms of population coverage, antigenicity, and immunogenicity.

[0112] Various strategies can be utilized to evaluate immunogenicity, including:

[0113] 1) Evaluation of primary T cell cultures from normal individuals (see, e.g., Wentworth, P. A. et al., Mol. Immunol. 32:603, 1995; Celis, E. et al., Proc. Natl. Acad. Sci. USA 91:2105, 1994; Tsai, V. et al., J. Immunol. 158:1796, 1997; Kawashima, I. et. al., Human Immunol. 59:1, 1998); This procedure involves the stimulation of peripheral blood lymphocytes (PBL) from normal subjects with a test peptide in the presence of antigen presenting cells in vitro over a period of several weeks. T cells specific for the peptide become activated during this time and are detected using, e.g., a lymphokine-release or a ⁵¹Cr cytotoxicity assay involving peptide sensitized target cells.

[0114] 2) Immunization of HLA transgenic mice (see, e.g., Wentworth, P. A. et al., J. Immunol. 26:97, 1996; Wentworth, P. A. et al., Int. Immunol. 8:651, 1996; Alexander, J. et al., J. Immunol. 159:4753, 1997); In this method, peptides in incomplete Freund's adjuvant are administered subcutaneously to HLA transgenic mice. Several weeks following immunization, splenocytes are removed and cultured in vitro in the presence of test peptide for approximately one week. Peptide-specific T cells are detected using, e.g., a ⁵¹Cr-release assay involving peptide sensitized target cells and target cells expressing endogenously generated antigen.

[0115] 3) Demonstration of recall T cell responses from patients who have been effectively vaccinated or who have a tumor; (see, e.g., Rehermann, B. et al., J. Exp. Med. 181:1047, 1995; Doolan, D. L. et al., Immunity 7:97, 1997; Bertoni, R. et al., J. Clin. Invest. 100:503, 1997; Threlkeld, S. C. et al., J. Immunol. 159:1648, 1997; Diepolder, H. M. et al., J. Virol. 71:6011, 1997; Tsang et al., J. Natl. Cancer Inst. 87:982-990, 1995; Disis et al., J. Immunol. 156:3151-3158, 1996). In applying this strategy, recall responses are detected by culturing PBL from patients with cancer who have generated an immune response “naturally”, or from patients who were vaccinated with tumor antigen vaccines. PBL from subjects are cultured in vitro for 1-2 weeks in the presence of test peptide plus antigen presenting cells (APC) to allow activation of “memory” T cells, as compared to “naive” T cells. At the end of the culture period, T cell activity is detected using assays for T cell activity including ⁵¹Cr release involving peptide-sensitized targets, T cell proliferation, or lymphokine release.

[0116] The following describes the peptide epitopes and corresponding nucleic acids of the invention.

IV.C. Binding Affinity of Peptide Epitopes for HLA Molecules

[0117] As indicated herein, the large degree of HLA polymorphism is an important factor to be taken into account with the epitope-based approach to vaccine development. To address this factor, epitope selection encompassing identification of peptides capable of binding at high or intermediate affinity to multiple HLA molecules is preferably utilized, most preferably these epitopes bind at high or intermediate affinity to two or more allele-specific HLA molecules.

[0118] CTL-inducing peptides of interest for vaccine compositions preferably include those that have an IC₅₀ or binding affinity value for class I HLA molecules of 500 nM or better (i.e., the value is ≦500 nM). HTL-inducing peptides preferably include those that have an IC₅₀ or binding affinity value for class II HLA molecules of 1000 nM or better, (i.e., the value is ≦1,000 nM). For example, peptide binding is assessed by testing the capacity of a candidate peptide to bind to a purified HLA molecule in vitro. Peptides exhibiting high or intermediate affinity are then considered for further analysis. Selected peptides are tested on other members of the supertype family. In preferred embodiments, peptides that exhibit cross-reactive binding are then used in cellular screening analyses or vaccines.

[0119] High HLA binding affinity is correlated with greater immunogenicity (see, e.g., Sette, et al., J. Immunol. 153:5586-5592, 1994; Chen et al., J. Immunol. 152:2874-2881, 1994; and Ressing et al., J. Immunol. 154:5934-5943, 1995). Greater immunogenicity can be manifested in several different ways. Immunogenicity corresponds to whether an immune response is elicited at all, and to the vigor of any particular response, as well as to the extent of a population in which a response is elicited. For example, a peptide might elicit an immune response in a diverse array of the population, yet in no instance produce a vigorous response. Moreover, higher binding affinity peptides lead to more vigorous immunogenic responses. As a result, less peptide is required to elicit a similar biological effect if a high or intermediate affinity binding peptide is used. Thus, in preferred embodiments of the invention, high or intermediate affinity binding epitopes are particularly useful.

[0120] The relationship between binding affinity for HLA class I molecules and immunogenicity of discrete peptide epitopes on bound antigens has been determined for the first time in the art by the present inventors. The correlation between binding affinity and immunogenicity was analyzed in two different experimental approaches (see, e.g., Sette, et al., J. Immunol. 153:5586-5592, 1994). In the first approach, the immunogenicity of potential epitopes ranging in HLA binding affinity over a 10,000-fold range was analyzed in HLA-A*0201 transgenic mice. In the second approach, the antigenicity of approximately 100 different hepatitis B virus (HBV)-derived potential epitopes, all carrying A*0201 binding motifs, was assessed by using PBL from acute hepatitis patients. Pursuant to these approaches, it was determined that an affinity threshold value of approximately 500 nM (preferably 50 nM or less) determines the capacity of a peptide epitope to elicit a CTL response. These data are true for class I binding affinity measurements for naturally processed peptides and for synthesized T cell epitopes. These data also indicate the important role of determinant selection in the shaping of T cell responses (see, e.g., Schaeffer et al., Proc. Natl. Acad. Sci. USA 86:4649-4653, 1989).

[0121] An affinity threshold associated with immunogenicity in the context of HLA class II DR molecules has also been delineated (see, e.g., Southwood et al. J. Immunology 160:3363-3373, 1998, and co-pending U.S. Ser. No. 09/009,953 filed Jan. 21, 1998). In order to define a biologically significant threshold of DR binding affinity, a database of the binding affinities of 32 DR-restricted epitopes for their restricting element (i.e., the HLA molecule that binds the motif) was compiled. In approximately half of the cases (15 of 32 epitopes), DR restriction was associated with high binding affinities, i.e. binding affinity values of 100 nM or less. In the other half of the cases (16 of 32), DR restriction was associated with intermediate affinity (binding affinity values in the 100-1000 nM range). In only one of 32 cases was DR restriction associated with an IC₅₀ of 1000 nM or greater. Thus, 1000 nM can be defined as an affinity threshold associated with immunogenicity in the context of DR molecules.

[0122] In the case of tumor-associated antigens, many CTL peptide epitopes that have been shown to induce CTL that lyse peptide-pulsed target cells and tumor cell targets endogenously expressing the epitope exhibit binding affinity or IC₅₀ values of 200 nM or less. In a study that evaluated the association of binding affinity and immunogenicity of a small set of such TAA epitopes, 100% (10/10) of the high binders, i.e., peptide epitopes binding at an affinity of 50 nM or less, were immunogenic and 80% (8/10) of them elicited CTLs that specifically recognized tumor cells. In the 51 to 200 nM range, very similar figures were obtained. With respect to analog peptides, CTL inductions positive for wildtype peptide and tumor cells were noted for 86% (6/7) and 71% (5/7) of the peptides, respectively. In the 201-500 nM range, most peptides (4/5 wildtype) were positive for induction of CTL recognizing wildtype peptide, but tumor recognition was not detected.

[0123] The binding affinity of peptides for HLA molecules can be determined as described in Example 1, below.

IV.D. Peptide Epitope Binding Motifs and Supermotifs

[0124] Through the study of single amino acid substituted antigen analogs and the sequencing of endogenously bound, naturally processed peptides, critical residues required for allele-specific binding to HLA molecules have been identified. The presence of these residues correlates with binding affinity for HLA molecules. The identification of motifs and/or supermotifs that correlate with high and intermediate affinity binding is an important issue with respect to the identification of immunogenic peptide epitopes for the inclusion in a vaccine. Kast et al. (J. Immunol. 152:3904-3912, 1994) have shown that motif-bearing peptides account for 90% of the epitopes that bind to allele-specific HLA class I molecules. In this study all possible peptides of 9 amino acids in length and overlapping by eight amino acids (240 peptides), which cover the entire sequence of the E6 and E7 proteins of human papillomavirus type 16, were evaluated for binding to five allele-specific HLA molecules that are expressed at high frequency among different ethnic groups. This unbiased set of peptides allowed an evaluation of the predictive value of HLA class I motifs. From the set of 240 peptides, 22 peptides were identified that bound to an allele-specific HLA molecule with high or intermediate affinity. Of these 22 peptides, 20 (i.e. 91%) were motif-bearing. Thus, this study demonstrates the value of motifs for the identification of peptide epitopes for inclusion in a vaccine: application of motif-based identification techniques will identify about 90% of the potential epitopes in a target antigen protein sequence.

[0125] Such peptide epitopes are identified in the Tables described below.

[0126] Peptides of the present invention may also comprise epitopes that bind to MHC class II DR molecules. A greater degree of heterogeneity in both size and binding frame position of the motif, relative to the N and C termini of the peptide, exists for class II peptide ligands. This increased heterogeneity of HLA class II peptide ligands is due to the structure of the binding groove of the HLA class II molecule which, unlike its class I counterpart, is open at both ends. Crystallographic analysis of HLA class II DRB*0101-peptide complexes showed that the major energy of binding is contributed by peptide residues complexed with complementary pockets on the DRB*0101 molecules. An important anchor residue engages the deepest hydrophobic pocket (see, e.g., Madden, D. R. Ann. Rev. Immunol. 13:587, 1995) and is referred to as position 1 (P1). P1 may represent the N-terminal residue of a class II binding peptide epitope, but more typically is flanked towards the N-terminus by one or more residues. Other studies have also pointed to an important role for the peptide residue in the 6^{th} position towards the C-terminus, relative to P1, for binding to various DR molecules.

[0127] In the past few years evidence has accumulated to demonstrate that a large fraction of HLA class I and class II molecules can be classified into a relatively few supertypes, each characterized by largely overlapping peptide binding repertoires, and consensus structures of the main peptide binding pockets. Thus, peptides of the present invention are identified by any one of several HLA-specific amino acid motifs (see, e.g., Tables I-III), or if the presence of the motif corresponds to the ability to bind several allele-specific HLA molecules, a supermotif. The HLA molecules that bind to peptides that possess a particular amino acid supermotif are collectively referred to as an HLA “supertype.”

[0128] The peptide motifs and supermotifs described below, and summarized in Tables I-III, provide guidance for the identification and use of peptide epitopes in accordance with the invention.

[0129] Examples of supermotif and/or motif-bearing peptide epitopes are shown in Tables VII-XX. To obtain the peptide epitope sequences, protein sequence data for the prostate cancer antigens PAP, PSA, PSM, and hK2, which is designated as kallikrein in Tables VII-XX, were evaluated for the presence of the designated supermotif or motif. The “Position” column indicates the position in the protein sequence that corresponds to the first amino acid residue of the putative epitope. The “number of amino acids” indicates the number of residues in the epitope sequence. The tables also include a binding affinity ratio listing for some of the peptide epitopes for the allele-specific HLA molecule indicated in the column heading. The ratio may be converted to IC₅₀ by using the following formula: IC₅₀ of the standard peptide/ratio=IC₅₀ of the test peptide (i.e., the peptide epitope). The IC₅₀ values of standard peptides used to determine binding affinities for Class I peptides are shown in Table IV. The IC₅₀ values of standard peptides used to determine binding affinities for Class II peptides are shown in Table V. The peptides used as standards for the binding assays described herein are examples of standards; alternative standard peptides can also be used when performing binding studies.

HLA Class I Motifs Indicative of CTL Inducing Peptide Epitopes:

[0130] The primary anchor residues of the HLA class I peptide epitope supermotifs and motifs delineated below are summarized in Table I. The HLA class I motifs set out in Table I(a) are those most particularly relevant to the invention claimed here. Primary and secondary anchor positions are summarized in Table II. Allele-specific HLA molecules that comprise HLA class I supertype families are listed in Table VI. In some cases, peptide epitopes may be listed in both a motif and a supermotif Table. The relationship of a particular motif and respective supermotif is indicated in the description of the individual motifs.

IV.D.1. HLA-A1 Supermotif

[0131] The HLA-A1 supermotif is characterized by the presence in peptide ligands of a small (T or S) or hydrophobic (L, I, V, or M) primary anchor residue in position 2, and an aromatic (Y, F, or W) primary anchor residue at the C-terminal position of the epitope. The corresponding family of HLA molecules that bind to the A1 supermotif (i.e., the HLA-A1 supertype) is comprised of at least: A*0101, A*2601, A*2602, A*2501, and A*3201 (see, e.g., DiBrino, M. et al., J. Immunol. 151:5930, 1993; DiBrino, M. et al., J. Immunol. 152:620, 1994; Kondo, A. et al., Immunogenetics 45:249, 1997). Other allele-specific HLA molecules predicted to be members of the A1 superfamily are shown in Table VI. Peptides binding to each of the individual HLA proteins can be modulated by substitutions at primary and/or secondary anchor positions, preferably choosing respective residues specified for the supermotif.

[0132] Representative peptide epitopes that comprise an A1 supermotif are set forth on the attached Table VII.

IV.D.2. HLA-A2 Supermotif

[0133] Primary anchor specificities for allele-specific HLA-A2.1 molecules (see, e.g., Falk et al., Nature 351:290-296, 1991; Hunt et al., Science 255:1261-1263, 1992; Parker et al., J. Immunol. 149:3580-3587, 1992; Ruppert et al., Cell 74:929-937, 1993) and cross-reactive binding among HLA-A2 and -A28 molecules have been described. (See, e.g., Fruci et al, Human Immunol. 38:187-192, 1993; Tanigaki et al., Human Immunol. 39:155-162, 1994; Del Guercio et al., J. Immunol. 154:685-693, 1995; Kast et al., J. Immunol. 152:3904-3912, 1994 for reviews of relevant data.) These primary anchor residues define the HLA-A2 supermotif; which presence in peptide ligands corresponds to the ability to bind several different HLA-A2 and -A28 molecules. The HLA-A2 supermotif comprises peptide ligands with L, I, V, M, A, T, or Q as a primary anchor-residue at position 2 and L, I, V, M, A, or T as a primary anchor residue at the C-terminal position of the epitope.

[0134] The corresponding family of HLA molecules (i.e., the HLA-A2 supertype that binds these peptides) is comprised of at least: A*0201, A*0202, A*0203, A*0204, A*0205, A*0206, A*0207, A*0209, A*0214, A*6802, and A*6901. Other allele-specific HLA molecules predicted to be members of the A2 superfamily are shown in Table VI. As explained in detail below, binding to each of the individual allele-specific HLA molecules can be modulated by substitutions at the primary anchor and/or secondary anchor positions, preferably choosing respective residues specified for the supermotif.

[0135] Representative peptide epitopes that comprise an A2 supermotif are set forth on the attached Table VIII. The motifs comprising the primary anchor residues V, A, T, or Q at position 2 and L, I, V, A, or T at the C-terminal position are those most particularly relevant to the invention claimed herein.

IV.D.3. HLA-A3 Supermotif

[0136] The HLA-A3 supermotif is characterized by the presence in peptide ligands of A, L, I, V, M, S, or, T as a primary anchor at position 2, and a positively charged residue, R or K, at the C-terminal position of the epitope, e.g., in position 9 of 9-mers (see, e.g., Sidney et al., Hum. Immunol. 45:79, 1996). Exemplary members of the corresponding family of HLA molecules (the HLA-A3 supertype) that bind the A3 supermotif include at least: A*0301, A*1101, A*3101, A*3301, and A*6801. Other allele-specific HLA molecules predicted to be members of the A3 supertype are shown in Table VI. As explained in detail below, peptide binding to each of the individual allele-specific HLA proteins can be modulated by substitutions of amino acids at the primary and/or secondary anchor positions of the peptide, preferably choosing respective residues specified for the supermotif.

[0137] Representative peptide epitopes that comprise the A3 supermotif are set forth on the attached Table IX.

IV.D.4. HLA-A24 Supermotif

[0138] The HLA-A24 supermotif is characterized by the presence in peptide ligands of an aromatic (F, W, or Y) or hydrophobic aliphatic (L, I, V, M, or T) residue as a primary anchor in position 2, and Y, F, W, L, I, or M as primary anchor at the C-terminal position of the epitope (see, e.g., Sette and Sidney, Immunogenetics, in press, 1999). The corresponding family of HLA molecules that bind to the A24 supermotif (i.e., the A24 supertype) includes at least: A*2402, A*3001, and A*2301. Other allele-specific HLA molecules predicted to be members of the A24 supertype are shown in Table VI. Peptide binding to each of the allele-specific HLA molecules can be modulated by substitutions at primary and/or secondary anchor positions, preferably choosing respective residues specified for the supermotif.

[0139] Representative peptide epitopes that comprise the A24 supermotif are set forth on the attached Table X.

IV.D.5. HLA-B7 Supermotif

[0140] The HLA-B7 supermotif is characterized by peptides bearing proline in position 2 as a primary anchor, and a hydrophobic or aliphatic amino acid (L, I, V, M, A, F, W, or Y) as the primary anchor at the C-terminal position of the epitope. The corresponding family of HLA molecules that bind the B7 supermotif (i.e., the HLA-B7 supertype) is comprised of at least twenty six HLA-B proteins comprising at least: B*0702, B*0703, B*0704, B*0705, B*1508, B*3501, B*3502, B*3503, B*3504, B*3505, B*3506, B*3507, B*3508, B*5101, B*5102, B*5103, B*5104, B*5105, B*5301, B*5401, B*5501, B*5502, B*5601, B*5602, B*6701, and B*7801 (see, e.g., Sidney, et al., J. Immunol. 154:247, 1995; Barber, et al., Curr. Biol. 5:179, 1995; Hill, et al., Nature 360:434, 1992; Rammensee, et al., Immunogenetics 41:178, 1995 for reviews of relevant data). Other allele-specific HLA molecules predicted to be members of the B7 supertype are shown in Table VI. As explained in detail below, peptide binding to each of the individual allele-specific HLA proteins can be modulated by substitutions at the primary and/or secondary anchor positions of the peptide, preferably choosing respective residues specified for the supermotif.

[0141] Representative peptide epitopes that comprise the B7 supermotif are set forth on the attached Table XI.

IV.D.6. HLA-B27 Supermotif

[0142] The HLA-B27 supermotif is characterized by the presence in peptide ligands of a positively charged (R, H, or K) residue as a primary anchor at position 2, and a hydrophobic (F, Y, L, W, M, I, A, or V) residue as a primary anchor at the C-terminal position of the epitope (see, e.g., Sidney and Sette, Immunogenetics, in press, 1999). Exemplary members of the corresponding family of HLA molecules that bind to the B27 supermotif (i.e., the B27 supertype) include at least B*1401, B*1402, B*1509, B*2702, B*2703, B*2704, B*2705, B*2706, B*3801, B*3901, B*3902, and B*7301. Other allele-specific HLA molecules predicted to be members of the B27 supertype are shown in Table VI. Peptide binding to each of the allele-specific HLA molecules can be modulated by substitutions at primary and/or secondary anchor positions, preferably choosing respective residues specified for the supermotif.

[0143] Representative peptide epitopes that comprise the B27 supermotif are set forth on the attached Table XII.

IV.D.7. HLA-B44 Supermotif

[0144] The HLA-B44 supermotif is characterized by the presence in peptide ligands of negatively charged (D or E) residues as a primary anchor in position 2, and hydrophobic residues (F, W, Y, L, I, M, V, or A) as a primary anchor at the C-terminal position of the epitope (see, e.g., Sidney et al., Immunol. Today 17:261, 1996). Exemplary members of the corresponding family of HLA molecules that bind to the B44 supermotif (i.e., the B44 supertype) include at least: B*1801, B*1802, B*3701, B*4001, B*4002, B*4006, B*4402, B*4403, and B*4404. Peptide binding to each of the allele-specific HLA molecules can be modulated by substitutions at primary and/or secondary anchor positions; preferably choosing respective residues specified for the supermotif.

IV.D.8. HLA-B58 Supermotif

[0145] The HLA-B58 supermotif is characterized by the presence in peptide ligands of a small aliphatic residue (A, S, or T) as a primary anchor residue at position 2, and an aromatic or hydrophobic residue (F, W, Y, L, I, V, M, or A) as a primary anchor residue at the C-terminal position of the epitope (see, e.g., Sidney and Sette, Immunogenetics, in press, 1999 for reviews of relevant data). Exemplary members of the corresponding family of HLA molecules that bind to the B58 supermotif (i.e., the B58 supertype) include at least: B*1516, B*1517, B*5701, B*5702, and B*5801. Other allele-specific HLA molecules predicted to be members of the B58 supertype are shown in Table VI. Peptide binding to each of the allele-specific HLA molecules can be modulated by substitutions at primary and/or secondary anchor positions, preferably choosing respective residues specified for the supermotif.

[0146] Representative peptide epitopes that comprise the B27 supermotif are set forth on the attached Table XII.

IV.D.9. HLA-B62 Supermotif

[0147] The HLA-B62 supermotif is characterized by the presence in peptide ligands of the polar aliphatic residue Q or a hydrophobic aliphatic residue (L, V, M, I, or P) as a primary anchor in position 2, and a hydrophobic residue (F, W, Y, M, I, V, L, or A) as a primary anchor at the C-terminal position of the epitope (see, e.g., Sidney and Sette, Immunogenetics, in press, 1999). Exemplary members of the corresponding family of HLA molecules that bind to the B62 supermotif (i.e., the B62 supertype) include at least: B*1501, B*1502, B*1513, and B5201. Other allele-specific HLA molecules predicted to be members of the B62 supertype are shown in Table VI. Peptide binding to each of the allele-specific HLA molecules can be modulated by substitutions at primary and/or secondary anchor positions, preferably choosing respective residues specified for the supermotif.

[0148] Representative peptide epitopes that comprise the B62 supermotif are set forth on the attached Table XIV.

IV.D.10. HLA-A1 Motif

[0149] The HLA-A1 motif is characterized by the presence in peptide ligands of T, S, or M as a primary anchor residue at position 2 and the presence of Y as a primary anchor residue at the C-terminal position of the epitope. An alternative allele-specific A1 motif is characterized by a primary anchor residue at position 3 rather than position 2. This motif is characterized by the presence of D, E, A, or S as a primary anchor residue in position 3, and a Y as a primary anchor residue at the C-terminal position of the epitope (see, e.g., DiBrino et al., J. Immunol., 152:620, 1994; Kondo et al., Immunogenetics 45:249, 1997; and Kubo et al., J. Immunol. 152:3913, 1994 for reviews of relevant data). Peptide binding to HLA-A1 can be modulated by substitutions at primary and/or secondary anchor positions, preferably choosing respective residues specified for the motif.

[0150] Representative peptide epitopes that comprise either A1 motif are set forth on the attached Table XV. Those epitopes comprising T, S, or M at position 2 and Y at the C-terminal position are also included in the listing of HLA-A1 supermotif-bearing peptide epitopes listed in Table VII, as these residues are a subset of the A1 supermotif.

IV.D.11. HLA-A*0201 Motif

[0151] An HLA-A2*0201 motif was determined to be characterized by the presence in peptide ligands of L or M as a primary anchor residue in position 2, and L or V as a primary anchor residue at the C-terminal position of a 9-residue peptide (see, e.g., Falk et al., Nature 351:290-296, 1991) and was further found to comprise an I at position 2 and I or A at the C-terminal position of a nine amino acid peptide (see, e.g., Hunt et al., Science 255:1261-1263, Mar. 6, 1992; Parker et al., J. Immunol. 149:3580-3587, 1992). The A*0201 allele-specific motif has also been defined by the present inventors to additionally comprise V, A, T, or Q as a primary anchor residue at position 2, and M or T as a primary anchor residue at the C-terminal position of the epitope (see, e.g., Kast et al., J. Immunol. 152:3904-3912, 1994). Thus, the HLA-A*0201 motif comprises peptide ligands with L, I, V, M, A, T, or Q as primary anchor residues at position 2 and L, I, V, M, A, or T as a primary anchor residue at the C-terminal position of the epitope. The preferred and tolerated residues that characterize the primary anchor positions of the HLA-A*0201 motif are identical to the residues describing the A2 supermotif. (For reviews of relevant data, see, e.g., del Guercio et al., J. Immunol. 154:685-693, 1995; Ruppert et al., Cell 74:929-937, 1993; Sidney et al., Immunol. Today 17:261-266, 1996; Sette and Sidney, Curr. Opin. in Immunol. 10:478-482, 1998). Secondary anchor residues that characterize the A*0201 motif have additionally been defined (see, e.g., Ruppert et al., Cell 74:929-937, 1993). These are shown in Table II. Peptide binding to HLA-A*0201 molecules can be modulated by substitutions at primary and/or secondary anchor positions, preferably choosing respective residues specified for the motif.

[0152] Representative peptide epitopes that comprise an A*0201 motif are set forth on the attached Table VII. The A*0201 motifs comprising the primary anchor residues V, A, T, or Q at position 2 and L, I, V, A, or T at the C-terminal position are those most particularly relevant to the invention claimed herein.

IV.D.12. HLA-A3 Motif

[0153] The HLA-A3 motif is characterized by the presence in peptide ligands of L, M, V, I, S, A, T, F, C, G, or D as a primary anchor residue at position 2, and the presence of K, Y, R, H, F, or A as a primary anchor residue at the C-terminal position of the epitope (see, e.g., DiBrino et al., Proc. Natl. Acad. Sci USA 90:1508, 1993; and Kubo et al., J. Immunol. 152:3913-3924, 1994). Peptide binding to HLA-A3 can be modulated by substitutions at primary and/or secondary anchor positions, preferably choosing respective residues specified for the motif.

[0154] Representative peptide epitopes that comprise the A3 motif are set forth on the attached Table XVI. Those epitopes that comprise the A3 supermotif are also listed in Table IX, as the A3 supermotif primary anchor residues comprise a subset of the A3- and A11-allele-specific motifs.

IV.D.13. HLA-A11 Motif

[0155] The HLA-A11 motif is characterized by the presence in peptide ligands of V, T, M, L, I, S, A, G, N, C, D, or F as a primary anchor residue in position 2, and K, k, Y, or H as a primary anchor residue at the C-terminal position of the epitope (see, e.g., Zhang et al., Proc. Natl. Acad. Sci USA 90:2217-2221, 1993; and Kubo et al., J. Immunol. 152:3913-3924, 1994). Peptide binding to HLA-A11 can be modulated by substitutions at primary and/or secondary anchor positions, preferably choosing respective residues specified for the motif.

[0156] Representative peptide epitopes that comprise the A1 I motif are set forth on the attached Table XVII; peptide epitopes comprising the A3 allele-specific motif are also present in this Table because of the extensive overlap between the A3 and A11 motif primary anchor specificities. Further, those peptide epitopes that comprise the A3 supermotif are also listed in Table IX.

IV.D.14. HLA-A24 Motif

[0157] The HLA-A24 motif is characterized by the presence in peptide ligands of Y, F, W, or M as a primary anchor residue in position 2, and F, L, I, or W as a primary anchor residue at the C-terminal position of the epitope (see, e.g., Kondo et al., J. Immunol. 155:4307-4312, 1995; and Kubo et al., J. Immunol. 152:3913-3924, 1994). Peptide binding to HLA-A24 molecules can be modulated by substitutions at primary and/or secondary anchor positions; preferably choosing respective residues specified for the motif.

[0158] Representative peptide epitopes that comprise the A24 motif are set forth on the attached Table XVIII. These epitopes are also listed in Table X, which sets forth HLA-A24-supermotif-bearing peptide epitopes, as the primary anchor residues characterizing the A24 allele-specific motif comprise a subset of the A24 supermotif primary anchor residues.

Motifs Indicative of Class II HTL Inducing Peptide Epitopes

[0159] The primary and secondary anchor residues of the HLA class II peptide epitope supermotifs and motifs delineated below are summarized in Table III.

IV.D.15. HLA DR-1-4-7 Supermotif

[0160] Motifs have also been identified for peptides that bind to three common HLA class II allele-specific HLA molecules: HLA DRB1*0401, DRB1*0101, and DRB1*0701 (see, e.g., the review by Southwood et al. J. Immunology 160:3363-3373, 1998). Collectively, the common residues from these motifs delineate the HLA DR-1-4-7 supermotif. Peptides that bind to these DR molecules carry a supermotif characterized by a large aromatic or hydrophobic residue (Y, F, W, L, I, V, or M) as a primary anchor residue in position 1, and a small, non-charged residue (S, T, C, A, P, V, I, L, or M) as a primary anchor residue in position 6 of a 9-mer core region. Allele-specific secondary effects and secondary anchors for each of these HLA types have also been identified (Southwood et al., supra). These are set forth in Table III. Peptide binding to HLA-DRB1*0401, DRB1*0101, and/or DRB1*0701 can be modulated by substitutions at primary and/or secondary anchor positions, preferably choosing respective residues specified for the supermotif.

[0161] Representative 9-mer epitopes comprising the DR-1-4-7 supermotif, wherein position 1 of the supermotif is at position 1 of the nine-residue core, are set forth in Table XIX. Respective exemplary peptide epitopes of 15 amino acid residues in length, each of which comprise a conserved nine residue core, are also shown in the Table.

IV.D.16. HLA-DR3 Motifs

[0162] Two alternative motifs (i.e., submotifs) characterize peptide epitopes that bind to HLA-DR3 molecules (see, e.g., Geluk et al., J. Immunol. 152:5742, 1994). In the first motif (submotif DR3a) a large, hydrophobic residue (L, I, V, M, F, or Y) is present in anchor position 1 of a 9-mer core, and D is present as an anchor at position 4, towards the carboxyl terminus of the epitope. As in other class II motifs, core position 1 may or may not occupy the peptide N-terminal position.

[0163] The alternative DR3 submotif provides for lack of the large, hydrophobic residue at anchor position 1, and/or lack of the negatively charged or amide-like anchor residue at position 4, by the presence of a positive charge at position 6 towards the carboxyl terminus of the epitope. Thus, for the alternative allele-specific DR3 motif (submotif DR3b): L, I, V, M, F, Y, A, or Y is present at anchor position 1; D, N, Q, E, S, or T is present at anchor position 4; and K, R, or H is present at anchor position 6. Peptide binding to HLA-DR3 can be modulated by substitutions at primary and/or secondary anchor positions, preferably choosing respective residues specified for the motif.

[0164] Peptide epitope 9-mer core regions corresponding to a nine residue sequence comprising the DR3a or the DR3b submotifs (wherein position 1 of the motif is at position 1 of the nine residue core) are set forth in Table XXa and b. Respective exemplary peptide epitopes of 15 amino acid residues in length, each of which comprise a conserved nine residue core, are also shown in Table XX.

[0165] Each of the HLA class I or class II peptide epitopes identified as described herein is deemed singly to be an inventive aspect of this application. Further, it is also an inventive aspect of this application that each peptide epitope may be used in combination with any other peptide epitope.

IV.E. Enhancing Population Coverage of the Vaccine

[0166] Vaccines that have broad population coverage are preferred because they are more commercially viable and generally applicable to the most people. Broad population coverage can be obtained using the peptides of the invention (and/or nucleic acid compositions that encode such peptides) through selecting peptide epitopes that bind to HLA alleles which, when considered in total, are present in most of the population. Table XXI shows the overall frequencies of HLA class I supertypes in various ethnicities (Table XXIa) and the combined population coverage achieved by the A2-, A3-, and B7-supertypes (Table XXIb). The A2-, A3-, and B7 supertypes are each present on average of over 40% in each of these five major ethnic groups. Coverage in excess of 80% is achieved with a combination of these supermotifs. These results suggest that effective and non-ethnically biased population coverage is achieved upon use of a limited number of cross-reactive peptides. Although the population coverage reached with these three main peptide specificities is high, coverage can be expanded to reach 95% population coverage and above, and more easily achieve truly multispecific responses upon use of additional supermotif or allele-specific motif bearing peptides.

[0167] The B44-, A1-, and A24-supertypes are each present, on average, in a range from 25% to 40% in these major ethnic populations (Table XXIa). While less prevalent overall, the B27-, B58-, and B62 supertypes are each present with a frequency >25% in at least one major ethnic group (Table XXIa). Table XXIb summarizes the estimated prevalence of combinations of HLA supertypes that have been identified in five major ethnic groups; the incremental coverage obtained by the inclusion of A1,- A24-, and B44-supertypes to the A2, A3, and B7 coverage; and coverage obtained with all of the supertypes described herein, is shown.

[0168] The data presented herein, together with the previous definition of the A2-, A3-, and B7-supertypes, indicates that all antigens, with the possible exception of A29, B8, and B46, can be classified into a total of nine HLA supertypes. By including epitopes from the six most frequent supertypes, an average population coverage of 99% is obtained for five major ethnic groups.

IV.F. Immune Response-Stimulating Peptide Analogs

[0169] In general, CTL and HTL responses to whole antigens are not directed against all possible epitopes. Rather, they are restricted to a few “immunodominant” determinants (Zinkemagel, et al., Adv. Immunol. 27:5159, 1979; Bennink, et al., J. Exp. Med. 168:1935-1939, 1988; Rawle, et al., J. Immunol. 146:3977-3984, 1991). It has been recognized that immunodominance (Benacerraf, et al., Science 175:273-279, 1972) could be explained by either the ability of a given epitope to selectively bind a particular HLA protein (determinant selection theory) (Vitiello, et al., J. Immunol. 131:1635, 1983); Rosenthal, et al., Nature 267:156-158, 1977), or to be selectively recognized by the existing TCR (T cell receptor) specificities (repertoire theory) (Klein, J., IMMUNOLOGY, THE SCIENCE OF SELF/NONSELF DISCRIMINATION, John Wiley & Sons, New York, pp. 270-310, 1982). It has been demonstrated that additional factors, mostly linked to processing events, can also play a key role in dictating, beyond strict immunogenicity, which of the many potential determinants will be presented as immunodominant (Sercarz, et al., Annu. Rev. Immunol. 11:729-766, 1993).

[0170] Because tissue specific and developmental TAAs are expressed on normal tissue at least at some point in time or location within the body, it may be expected that T cells to them, particularly dominant epitopes, are eliminated during immunological surveillance and that tolerance is induced. However, CTL responses to tumor epitopes in both normal donors and cancer patient have been detected, which may indicate that tolerance is incomplete (see, e.g., Kawashima et al., Hum. Immunol. 59:1, 1998; Tsang, J. Natl. Cancer Inst. 87:82-90, 1995; Rongcun et al., J. Immunol. 163:1037, 1999). Thus, immune tolerance does not completely eliminate or inactivate CTL precursors capable of recognizing high affinity HLA class I binding peptides.

[0171] An additional strategy to overcome tolerance is to use analog peptides. Without intending to be bound by theory, it is believed that because T cells to dominant epitopes may have been clonally deleted, selecting subdominant epitopes may allow existing T cells to be recruited, which will then lead to a therapeutic or prophylactic response. However, the binding of HLA molecules to subdominant epitopes is often less vigorous than to dominant ones. Accordingly, there is a need to be able to modulate the binding affinity of particular immunogenic epitopes for one or more HLA molecules, and thereby to modulate the immune response elicited by the peptide, for example to prepare analog peptides which elicit a more vigorous response.

[0172] Although peptides with suitable cross-reactivity among all alleles of a superfamily are identified by the screening procedures described above, cross-reactivity is not always as complete as possible, and in certain cases procedures to increase cross-reactivity of peptides can be useful; moreover, such procedures can also be used to modify other properties of the peptides such as binding affinity or peptide stability. Having established the general rules that govern cross-reactivity of peptides for HLA alleles within a given motif or supermotif, modification (i.e., analoging) of the structure of peptides of particular interest in order to achieve broader (or otherwise modified) HLA binding capacity can be performed. More specifically, peptides which exhibit the broadest cross-reactivity patterns, can be produced in accordance with the teachings herein. The present concepts related to analog generation are set forth in greater detail in co-pending U.S. Ser. No. 09/226,775 filed Jan. 6, 1999.

[0173] In brief, the strategy employed utilizes the motifs or supermotifs which correlate with binding to certain HLA molecules. The motifs or supermotifs are defined by having primary anchors, and in many cases secondary anchors. Analog peptides can be created by substituting amino acid residues at primary anchor, secondary anchor, or at primary and secondary anchor positions. Generally, analogs are made for peptides that already bear a motif or supermotif. Preferred secondary anchor residues of supermotifs and motifs that have been defined for HLA class I and class II binding peptides are shown in Tables II and III, respectively.

[0174] For a number of the motifs or supermotifs in accordance with the invention, residues are defined which are deleterious to binding to allele-specific HLA molecules or members of HLA supertypes that bind the respective motif or supermotif (Tables II and III). Accordingly, removal of such residues that are detrimental to binding can be performed in accordance with the present invention. For example, in the case of the A3 supertype, when all peptides that have such deleterious residues are removed from the population of peptides used in the analysis, the incidence of cross-reactivity increased from 22% to 37% (see, e.g., Sidney, J. et al., Hu. Immunol. 45:79, 1996). Thus, one strategy to improve the cross-reactivity of peptides within a given supermotif is simply to delete one or more of the deleterious residues present within a peptide and substitute a small “neutral” residue such as Ala (that may not influence T cell recognition of the peptide). An enhanced likelihood of cross-reactivity is expected if, together with elimination of detrimental residues within a peptide, “preferred” residues associated with high affinity binding to an allele-specific HLA molecule or to multiple HLA molecules within a superfamily are inserted.

[0175] To ensure that an analog peptide, when used as a vaccine, actually elicits a CTL response to the native epitope in vivo (or, in the case of class II epitopes, elicits helper T cells that cross-react with the wild type peptides), the analog peptide may be used to immunize T cells in vitro from individuals of the appropriate HLA allele. Thereafter, the immunized cells' capacity to induce lysis of wild type peptide sensitized target cells is evaluated. It will be desirable to use as antigen presenting cells, cells that have been either infected, or transfected with the appropriate genes, or, in the case of class II epitopes, cells that have been pulsed with whole protein antigens, to establish whether endogenously produced antigen is also recognized by the relevant T cells.

[0176] Another embodiment of the invention is to create analogs of weak binding peptides, to thereby ensure adequate numbers of cross-reactive cellular binders. Class I binding peptides exhibiting binding affinities of 500-5000 nM, and carrying an acceptable but suboptimal primary anchor residue at one or both positions can be “fixed” by substituting preferred anchor residues in accordance with the respective supertype. The analog peptides can then be tested for crossbinding activity.

[0177] Another embodiment for generating effective peptide analogs involves the substitution of residues that have an adverse impact on peptide stability or solubility in, e.g., a liquid environment. This substitution may occur at any position of the peptide epitope. For example, a cysteine can be substituted out in favor of α-amino butyric acid (“B” in the single letter abbreviations for peptide sequences listed herein). Due to its chemical nature, cysteine has the propensity to form disulfide bridges and sufficiently alter the peptide structurally so as to reduce binding capacity. Substituting α-amino butyric acid for cysteine not only alleviates this problem, but actually improves binding and crossbinding capability in certain instances (see, e.g., the review by Sette et al., In: Persistent Viral Infections, Eds. R. Ahmed and I. Chen, John Wiley & Sons, England, 1999).

IV.G. Computer Screening of Protein Sequences from Disease-Related Antigens for Supermotif- or Motif-Bearing Peptides

[0178] In order to identify supermotif- or motif-bearing epitopes in a target antigen, a native protein sequence, e.g., a tumor-associated antigen, or sequences from an infectious organism, or a donor tissue for transplantation, is screened using a means for computing, such as an intellectual calculation or a computer, to determine the presence of a supermotif or motif within the sequence. The information obtained from the analysis of native peptide can be used directly to evaluate the status of the native peptide or may be utilized subsequently to generate the peptide epitope.

[0179] Computer programs that allow the rapid screening of protein sequences for the occurrence of the subject supermotifs or motifs are encompassed by the present invention; as are programs that permit the generation of analog peptides. These programs are implemented to analyze any identified amino acid sequence or operate on an unknown sequence and simultaneously determine the sequence and identify motif-bearing epitopes thereof; analogs can be simultaneously determined as well. Generally, the identified sequences will be from a pathogenic organism or a tumor-associated peptide. In the present invention, the target TAA molecules include, without limitation, PSA, PSM, PAP, and hK2.

[0180] It is important that the selection criteria utilized for prediction of peptide binding are as accurate as possible, to correlate most efficiently with actual binding. Prediction of peptides that bind, for example, to HLA-A*0201, on the basis of the presence of the appropriate primary anchors, is positive at about a 30% rate (see, e.g., Ruppert, J. et al. Cell 74:929, 1993). However, by extensively analyzing peptide-HLA binding data disclosed herein, data in related patent applications, and data in the art, the present inventors have developed a number of allele-specific polynomial algorithms that dramatically increase the predictive value over identification on the basis of the presence of primary anchor residues alone. These algorithms take into account not only the presence or absence of primary anchors, but also consider the positive or deleterious presence of secondary anchor residues (to account for the impact of different amino acids at different positions). The algorithms are essentially based on the premise that the overall affinity (or ΔG) of peptide-HLA interactions can be approximated as a linear polynomial function of the type:
ΔG=a₁ᵢ×a₂ᵢ×a₃ᵢ . . . ×aₙᵢ
where aⱼᵢ is a coefficient that represents the effect of the presence of a given amino acid (j) at a given position (i) along the sequence of a peptide of n amino acids. An important assumption of this method is that the effects at each position are essentially independent of each other. This assumption is justified by studies that demonstrated that peptides are bound to HLA molecules and recognized by T cells in essentially an extended conformation. Derivation of specific algorithm coefficients has been described, for example, in Gulukota, K. et al., J. Mol. Biol. 267:1258, 1997.

[0181] Additional methods to identify preferred peptide sequences, which also make use of specific motifs, include the use of neural networks and molecular modeling programs (see, e.g., Milik et al., Nature Biotechnology 16:753, 1998; Altuvia et al., Hum. Immunol. 58:1, 1997; Altuvia et al, J. Mol. Biol. 249:244, 1995; Buus, S. Curr. Opin. Immunol. 11:209-213, 1999; Brusic, V. et al., Bioinformatics 14:121-130, 1998; Parker et al., J. Immunol. 152:163, 1993; Meister et al., Vaccine 13:581, 1995; Hammer et al., J. Exp. Med. 180:2353, 1994; Sturniolo et al., Nature Biotechnol. 17:555 1999).

[0182] For example, it has been shown that in sets of A*0201 motif-bearing peptides containing at least one preferred secondary anchor residue while avoiding the presence of any deleterious secondary anchor residues, 69% of the peptides will bind A*0201 with an IC₅₀ less than 500 nM (Ruppert, J. et al. Cell 74:929, 1993). These algorithms are also flexible in that cut-off scores may be adjusted to select sets of peptides with greater or lower predicted binding properties, as desired.

[0183] In utilizing computer screening to identify peptide epitopes, a protein sequence or translated sequence may be analyzed using software developed to search for motifs, for example the “FINDPATTERNS’ program (Devereux, et al. Nucl. Acids Res. 12:387-395, 1984) or MotifSearch 1.4 software program (D. Brown, San Diego, Calif.) to identify potential peptide sequences containing appropriate HLA binding motifs. The identified peptides can be scored using customized polynomial algorithms to predict their capacity to bind specific HLA class I or class II alleles. As appreciated by one of ordinary skill in the art, a large array of computer programming software and hardware options are available in the relevant art which can be employed to implement the motifs of the invention in order to evaluate (e.g., without limitation, to identify epitopes, identify epitope concentration per peptide length, or to generate analogs) known or unknown peptide sequences.

[0184] In accordance with the procedures described above, prostate cancer-associated antigen peptide epitopes and analogs thereof that are able to bind HLA supertype groups or allele-specific HLA molecules are identified.

IV.H. Preparation of Peptide Epitopes

[0185] Peptides in accordance with the invention can be prepared synthetically, by recombinant DNA technology or chemical synthesis, or from natural sources such as native tumors or pathogenic organisms. Peptide epitopes may be synthesized individually or as polyepitopic peptides. Although the peptide will preferably be substantially free of other naturally occurring host cell proteins and fragments thereof, in some embodiments the peptides may be synthetically conjugated to native fragments or particles.

[0186] The peptides in accordance with the invention can be a variety of lengths, and either in their neutral (uncharged) forms or in forms which are salts. The peptides in accordance with the invention are either free of modifications such as glycosylation, side chain oxidation, or phosphorylation; or they contain these modifications, subject to the condition that modifications do not destroy the biological activity of the peptides as described herein.

[0187] When possible, it may be desirable to optimize HLA class I binding epitopes of the invention, such as can be used in a polyepitopic construct, to a length of about 8 to about 13 amino acid residues, often 8 to 11, preferably 9 to 10. HLA class II binding peptide epitopes of the invention may be optimized to a length of about 6 to about 30 amino acids in length, preferably to between about 13 and about 20 residues. Preferably, the peptide epitopes are commensurate in size with endogenously processed pathogen-derived peptides or tumor cell peptides that are bound to the relevant HLA molecules, however, the identification and preparation of peptides that comprise epitopes of the invention can also be carried out using the techniques described herein.

[0188] In alternative embodiments, epitopes of the invention can be linked as a polyepitopic peptide, or as a minigene that encodes a polyepitopic peptide.

[0189] In another embodiment, it is preferred to identify native peptide regions that contain a high concentration of class I and/or class II epitopes. Such a sequence is generally selected on the basis that it contains the greatest number of epitopes per amino acid length. It is to be appreciated that epitopes can be present in a nested or overlapping manner, e.g. a 10 amino acid long peptide could contain two 9 amino acid long epitopes and one 10 amino acid long epitope; upon intracellular processing, each epitope can be exposed and bound by an HLA molecule upon administration of such a peptide. This larger, preferably multi-epitopic, peptide can be generated synthetically, recombinantly, or via cleavage from the native source.

[0190] The peptides of the invention can be prepared in a wide variety of ways. For the preferred relatively short size, the peptides can be synthesized in solution or on a solid support in accordance with conventional techniques. Various automatic synthesizers are commercially available and can be used in accordance with known protocols. (See, for example, Stewart & Young, SOLID PHASE PEPTIDE SYNTHESIS, 2D. ED., Pierce Chemical Co., 1984). Further, individual peptide epitopes can be joined using chemical ligation to produce larger peptides that are still within the bounds of the invention.

[0191] Alternatively, recombinant DNA technology can be employed wherein a nucleotide sequence which encodes an immunogenic peptide of interest is inserted into an expression vector, transformed or transfected into an appropriate host cell and cultivated under conditions suitable for expression. These procedures are generally known in the art, as described generally in Sambrook et al., MOLECULAR CLONING, A LABORATORY MANUAL, Cold Spring Harbor Press, Cold Spring Harbor, N.Y. (1989). Thus, recombinant polypeptides which comprise one or more peptide sequences of the invention can be used to present the appropriate T cell epitope.

[0192] The nucleotide coding sequence for peptide epitopes of the preferred lengths contemplated herein can be synthesized by chemical techniques, for example, the phosphotriester method of Matteucci, et al., J. Am. Chem. Soc. 103:3185 (1981). Peptide analogs can be made simply by substituting the appropriate and desired nucleic acid base(s) for those that encode the native peptide sequence; exemplary nucleic acid substitutions are those that encode an amino acid defined by the motifs/supermotifs herein. The coding sequence can then be provided with appropriate linkers and ligated into expression vectors commonly available in the art, and the vectors used to transform suitable hosts to produce the desired fusion protein. A number of such vectors and suitable host systems are now available. For expression of the fusion proteins, the coding sequence will be provided with operably linked start and stop codons, promoter and terminator regions and usually a replication system to provide an expression vector for expression in the desired cellular host. For example, promoter sequences compatible with bacterial hosts are provided in plasmids containing convenient restriction sites for insertion of the desired coding sequence. The resulting expression vectors are transformed into suitable bacterial hosts. Of course, yeast, insect or mammalian cell hosts may also be used, employing suitable vectors and control sequences.

IV.I. Assays to Detect T-Cell Responses

[0193] Once HLA binding peptides are identified, they can be tested for the ability to elicit a T-cell response. The preparation and evaluation of motif-bearing peptides are described in PCT publications WO 94/20127 and WO 94/03205. Briefly, peptides comprising epitopes from a particular antigen are synthesized and tested for their ability to bind to the appropriate HLA proteins. These assays may involve evaluating the binding of a peptide of the invention to purified HLA class I molecules in relation to the binding of a radioiodinated reference peptide. Alternatively, cells expressing empty class I molecules (i.e. lacking peptide therein) may be evaluated for peptide binding by immunofluorescent staining and flow microfluorimetry. Other assays that may be used to evaluate peptide binding include peptide-dependent class I assembly assays and/or the inhibition of CTL recognition by peptide competition. Those peptides that bind to the class I molecule, typically with an affinity of 500 nM or less, are further evaluated for their ability to serve as targets for CTLs derived from infected or immunized individuals, as well as for their capacity to induce primary in vitro or in vivo CTL responses that can give rise to CTL populations capable of reacting with selected target cells associated with a disease.

[0194] Analogous assays are used for evaluation of HLA class II binding peptides. HLA class II motif-bearing peptides that are shown to bind, typically at an affinity of 1000 nM or less, are further evaluated for the ability to stimulate HTL responses.

[0195] Conventional assays utilized to detect T cell responses include proliferation assays, lymphokine secretion assays, direct cytotoxicity assays, and limiting dilution assays. For example, antigen-presenting cells that have been incubated with a peptide can be assayed for the ability to induce CTL responses in responder cell populations. Antigen-presenting cells can be normal cells such as peripheral blood mononuclear cells or dendritic cells. Alternatively, mutant non-human mammalian cell lines that are deficient in their ability to load class I molecules with internally processed peptides and that have been transfected with the appropriate human class I gene, may be used to test for the capacity of the peptide to induce in vitro primary CTL responses.

[0196] Peripheral blood mononuclear cells (PBMCs) may be used as the responder cell source of CTL precursors. The appropriate antigen-presenting cells are incubated with peptide, after which the peptide-loaded antigen-presenting cells are then incubated with the responder cell population under optimized culture conditions. Positive CTL activation can be determined by assaying the culture for the presence of CTLs that kill radio-labeled target cells, both specific peptide-pulsed targets as well as target cells expressing endogenously processed forms of the antigen from which the peptide sequence was derived.

[0197] Additionally, a method has been devised which allows direct quantification of antigen-specific T cells by staining with Fluorescein-labelled HLA tetrameric complexes (Altman, J. D. et al., Proc. Natl. Acad. Sci. USA 90:10330, 1993; Altman, J. D. et al., Science 274:94, 1996). Other relatively recent technical developments include staining for intracellular lymphokines, and interferon-γ release assays or ELISPOT assays. Tetramer staining, intracellular lymphokine staining and ELISPOT assays all appear to be at least 10-fold more sensitive than more conventional assays (Lalvani, A. et al., J. Exp. Med. 186:859, 1997; Dunbar, P. R. et al., Curr. Biol. 8:413, 1998; Murali-Krishna, K. et al., Immunity 8:177, 1998).

[0198] HTL activation may also be assessed using such techniques known to those in the art such as T cell proliferation and secretion of lymphokines, e.g. IL-2 (see, e.g. Alexander et al., Immunity 1:751-761, 1994).

[0199] Alternatively, immunization of HLA transgenic mice can be used to determine immunogenicity of peptide epitopes. Several transgenic mouse models including mice with human A2.1, A11 (which can additionally be used to analyze HLA-A3 epitopes), and B7 alleles have been characterized and others (e.g., transgenic mice for HLA-A1 and A24) are being developed. HLA-DR1 and HLA-DR3 mouse models have also been developed. Additional transgenic mouse models with other HLA alleles may be generated as necessary. The mice may be immunized with peptides emulsified in Incomplete Freund's Adjuvant and the resulting T cells tested for their capacity to recognize peptide-pulsed target cells and target cells transfected with appropriate genes. CTL responses may be analyzed using cytotoxicity assays described above. Similarly, HTL responses may be analyzed using such assays as T cell proliferation or secretion of lymphokines.

IV.J. Use of Peptide Epitopes as Diagnostic Agents and for Evaluating Immune Responses

[0200] In one embodiment of the invention, HLA class I and class II binding peptides as described herein are used as reagents to evaluate an immune response. The immune response to be evaluated is induced by using as an immunogen any agent that may result in the production of antigen-specific CTLs or HTLs that recognize and bind to the peptide epitope(s) to be employed as the reagent. The peptide reagent need not be used as the immunogen. Assay systems that are used for such an analysis include relatively recent technical developments such as tetramers, staining for intracellular lymphokines and interferon release assays, or ELISPOT assays.

[0201] For example, peptides of the invention are used in tetramer staining assays to assess peripheral blood mononuclear cells for the presence of antigen-specific CTLs following exposure to a tumor cell antigen or an immunogen. The HLA-tetrameric complex is used to directly visualize antigen-specific CTLs (see, e.g., Ogg et al., Science 279:2103-2106, 1998; and Altman et al., Science 174:94-96, 1996) and determine the frequency of the antigen-specific CTL population in a sample of peripheral blood mononuclear cells. A tetramer reagent using a peptide of the invention is generated as follows: A peptide that binds to an HLA molecule is refolded in the presence of the corresponding HLA heavy chain and β₂-microglobulin to generate a trimolecular complex. The complex is biotinylated at the carboxyl terminal end of the heavy chain at a site that was previously engineered into the protein. Tetramer formation is then induced by the addition of streptavidin. By means of fluorescently labeled streptavidin, the tetramer can be used to stain antigen-specific cells. The cells can then be identified, for example, by flow cytometry. Such an analysis may be used for diagnostic or prognostic purposes. Cells identified by the procedure can also be used for therapeutic purposes.

[0202] Peptides of the invention are also used as reagents to evaluate immune recall responses (see, e.g., Bertoni et al., J. Clin. Invest. 100:503-513, 1997 and Penna et al., J. Exp. Med. 174:1565-1570, 1991). For example, patient PBMC samples from individuals with cancer are analyzed for the presence of antigen-specific CTLs or HTLs using specific peptides. A blood sample containing mononuclear cells can be evaluated by cultivating the PBMCs and stimulating the cells with a peptide of the invention. After an appropriate cultivation period, the expanded cell population can be analyzed, for example, for CTL or for HTL activity.

[0203] The peptides are also used as reagents to evaluate the efficacy of a vaccine. PBMCs obtained from a patient vaccinated with an immunogen are analyzed using, for example, either of the methods described above. The patient is HLA typed, and peptide epitope reagents that recognize the allele-specific molecules present in that patient are selected for the analysis. The immunogenicity of the vaccine is indicated by the presence of epitope-specific CTLs and/or HTLs in the PBMC sample.

[0204] The peptides of the invention are also used to make antibodies, using techniques well known in the art (see, e.g. CURRENT PROTOCOLS IN IMMUNOLOGY, Wiley/Greene, NY; and Antibodies A Laboratory Manual, Harlow and Lane, Cold Spring Harbor Laboratory Press, 1989), which may be useful as reagents to diagnose or monitor cancer. Such antibodies include those that recognize a peptide in the context of an HLA molecule, i.e., antibodies that bind to a peptide-MHC complex.

IV.K. Vaccine Compositions

[0205] Vaccines and methods of preparing vaccines that contain an immunogenically effective amount of one or more peptides as described herein are further embodiments of the invention. Once appropriately immunogenic epitopes have been defined, they can be sorted and delivered by various means, herein referred to as “vaccine” compositions. Such vaccine compositions can include, for example, lipopeptides (e.g., Vitiello, A. et al., J. Clin. Invest. 95:341, 1995), peptide compositions encapsulated in poly(DL-lactide-co-glycolide) (“PLG”) microspheres (see, e.g., Eldridge, et al., Molec. Immunol. 28:287-294, 1991: Alonso et al., Vaccine 12:299-306, 1994; Jones et al., Vaccine 13:675-681, 1995), peptide compositions contained in immune stimulating complexes (ISCOMS) (see, e.g., Takahashi et al., Nature 344:873-875, 1990; Hu et al., Clin Exp Immunol. 113:235-243, 1998), multiple antigen peptide systems (MAPs) (see e.g., Tam, J. P., Proc. Natl. Acad. Sci. U.S.A. 85:5409-5413, 1988; Tam, J. P., J. Immunol. Methods 196:17-32, 1996), peptides formulated as multivalent peptides; peptides for use in ballistic delivery systems, typically crystallized peptides, viral delivery vectors (Perkus, M. E. et al., In: Concepts in vaccine development, Kaufmann, S. H. E., ed., p. 379, 1996; Chakrabarti, S. et al., Nature 320:535, 1986; Hu, S. L. et al., Nature 320:537, 1986; Kieny, M.-P. et al., AIDS Bio/Technology 4:790, 1986; Top, F. H. et al., J. Infect. Dis. 124:148, 1971; Chanda, P. K. et al., Virology 175:535, 1990), particles of viral or synthetic origin (e.g., Kofler, N. et al., J. Immunol. Methods. 192:25, 1996; Eldridge, J. H. et al., Sem. Hematol. 30:16, 1993; Falo, L. D., Jr. et al., Nature Med. 7:649, 1995), adjuvants (Warren, H. S., Vogel, F. R., and Chedid, L. A. Annu. Rev. Immunol. 4:369, 1986; Gupta, R. K. et al., Vaccine 11:293, 1993), liposomes (Reddy, R. et al., J. Immunol. 148:1585, 1992; Rock, K. L., Immunol. Today 17:131, 1996), or, naked or particle absorbed cDNA (Ulmer, J. B. et al., Science 259:1745, 1993; Robinson, H. L., Hunt, L. A., and Webster, R. G., Vaccine 11:957, 1993; Shiver, J. W. et al., In: Concepts in vaccine development, Kaufmann, S. H. E., ed., p. 423, 1996; Cease, K. B., and Berzofsky, J. A., Annu. Rev. Immunol. 12:923, 1994 and Eldridge, J. H. et al., Sem. Hematol. 30:16, 1993). Toxin-targeted delivery technologies, also known as receptor mediated targeting, such as those of Avant Immunotherapeutics, Inc. (Needham, Mass.) may also be used.

[0206] Vaccines of the invention include nucleic acid-mediated modalities. DNA or RNA encoding one or more of the peptides of the invention can also be administered to a patient. This approach is described, for instance, in Wolff et. al., Science 247:1465 (1990) as well as U.S. Pat. Nos. 5,580,859; 5,589,466; 5,804,566; 5,739,118; 5,736,524; 5,679,647; WO 98/04720; and in more detail below. Examples of DNA-based delivery technologies include “naked DNA”, facilitated (bupivicaine, polymers, peptide-mediated) delivery, cationic lipid complexes, and particle-mediated (“gene gun”) or pressure-mediated delivery (see, e.g., U.S. Pat. No. 5,922,687).

[0207] For therapeutic or prophylactic immunization purposes, the peptides of the invention can also be expressed by viral or bacterial vectors. Examples of expression vectors include attenuated viral hosts, such as vaccinia or fowlpox. As an example of this approach, vaccinia virus is used as a vector to express nucleotide sequences that encode the peptides of the invention. Upon introduction into a host bearing a tumor, the recombinant vaccinia virus expresses the immunogenic peptide, and thereby elicits a host CTL and/or HTL response. Vaccinia vectors and methods useful in immunization protocols are described in, e.g., U.S. Pat. No. 4,722,848. Another vector is BCG (Bacille Calmette Guerin). BCG vectors are described in Stover et al., Nature 351:456-460 (1991). A wide variety of other vectors useful for therapeutic administration or immunization of the peptides of the invention, e.g. adeno and adeno-associated virus vectors, retroviral vectors, Salmonella typhi vectors, detoxified anthrax toxin vectors, and the like, will be apparent to those skilled in the art from the description herein.

[0208] Furthermore, vaccines in accordance with the invention encompass compositions of one or more of the claimed peptides. A peptide can be present in a vaccine individually. Alternatively, the peptide can exist as a homopolymer comprising multiple copies of the same peptide, or as a heteropolymer of various peptides. Polymers have the advantage of increased immunological reaction and, where different peptide epitopes are used to make up the polymer, the additional ability to induce antibodies and/or CTLs that react with different antigenic determinants of the pathogenic organism or tumor-related peptide targeted for an immune response. The composition can be a naturally occurring region of an antigen or can be prepared, e.g., recombinantly or by chemical synthesis.

[0209] Carriers that can be used with vaccines of the invention are well known in the art, and include, e.g., thyroglobulin, albumins such as human serum albumin, tetanus toxoid, polyamino acids such as poly L-lysine, poly L-glutamic acid, influenza, hepatitis B virus core protein, and the like. The vaccines can contain a physiologically tolerable (i.e., acceptable) diluent such as water, or saline, preferably phosphate buffered saline. The vaccines also typically include an adjuvant. Adjuvants such as incomplete Freund's adjuvant, aluminum phosphate, aluminum hydroxide, or alum are examples of materials well known in the art. Additionally, as disclosed herein, CTL responses can be primed by conjugating peptides of the invention to lipids, such as tripalmitoyl-S-glycerylcysteinlyseryl-serine (P₃CSS).

[0210] Upon immunization with a peptide composition in accordance with the invention, via injection, aerosol, oral, transdermal, transmucosal, intrapleural, intrathecal, or other suitable routes, the immune system of the host responds to the vaccine by producing large amounts of CTLs and/or HTLs specific for the desired antigen. Consequently, the host becomes at least partially immune to later infection, or at least partially resistant to developing an ongoing chronic infection, or derives at least some therapeutic benefit when the antigen was tumor-associated.

[0211] In some embodiments, it may be desirable to combine the class I peptide components with components that induce or facilitate neutralizing antibody and or helper T cell responses to the target antigen of interest. A preferred embodiment of such a composition comprises class I and class II epitopes in accordance with the invention. An alternative embodiment of such a composition comprises a class I and/or class II epitope in accordance with the invention, along with a PADRE™ (Epimmune, San Diego, Calif.) molecule (described, for example, in U.S. Pat. No. 5,736,142).

[0212] A vaccine of the invention can also include antigen-presenting cells (APC), such as dendritic cells (DC), as a vehicle to present peptides of the invention. Vaccine compositions can be created in vitro, following dendritic cell mobilization and harvesting, whereby loading of dendritic cells occurs in vitro. For example, dendritic cells are transfected, e.g., with a minigene in accordance with the invention, or are pulsed with peptides. The dendritic cell can then be administered to a patient to elicit immune responses in vivo.

[0213] Vaccine compositions, either DNA- or peptide-based, can also be administered in vivo in combination with dendritic cell mobilization whereby loading of dendritic cells occurs in vivo.

[0214] Antigenic peptides are used to elicit a CTL and/or HTL response ex vivo, as well. The resulting CTL or HTL cells, can be used to treat tumors in patients that do not respond to other conventional forms of therapy, or will not respond to a therapeutic vaccine peptide or nucleic acid in accordance with the invention. Ex vivo CTL or HTL responses to a particular tumor-associated antigen are induced by incubating in tissue culture the patient's, or genetically compatible, CTL or HTL precursor cells together with a source of antigen-presenting cells, such as dendritic cells, and the appropriate immunogenic peptide. After an appropriate incubation time (typically about 7-28 days), in which the precursor cells are activated and expanded into effector cells, the cells are infused back into the patient, where they will destroy (CTL) or facilitate destruction (HTL) of their specific target cell (an infected cell or a tumor cell). Transfected dendritic cells may also be used as antigen presenting cells.

[0215] The vaccine compositions of the invention can also be used in combination with other treatments used for cancer, including use in combination with immune adjuvants such as IL-2, IL-12, GM-CSF, and the like.

[0216] Preferably, the following principles are utilized when selecting an array of epitopes for inclusion in a polyepitopic composition for use in a vaccine, or for selecting discrete epitopes to be included in a vaccine and/or to be encoded by nucleic acids such as a minigene. It is preferred that each of the following principles are balanced in order to make the selection. The multiple epitopes to be incorporated in a given vaccine composition may be, but need not be, contiguous in sequence in the native antigen from which the epitopes are derived.

[0217] 1.) Epitopes are selected which, upon administration, mimic immune responses that have been observed to be correlated with tumor clearance. For HLA Class I this includes 3-4 epitopes that come from at least one TAA. For HLA Class II a similar rationale is employed; again 3-4 epitopes are selected from at least one TAA (see e.g., Rosenberg et al., Science 278:1447-1450). Epitopes from one TAA may be used in combination with epitopes from one or more additional TAAs to produce a vaccine that targets tumors with varying expression patterns of frequently-expressed TAAs as described, e.g., in Example 15.

[0218] 2.) Epitopes are selected that have the requisite binding affinity established to be correlated with immunogenicity: for HLA Class I an IC₅₀ of 500 nM or less, often 200 nM or less; and for Class II an IC₅₀ of 1000 nM or less.

[0219] 3.) Sufficient supermotif bearing-peptides, or a sufficient array of allele-specific motif-bearing peptides, are selected to give broad population coverage. For example, it is preferable to have at least 80% population coverage. A Monte Carlo analysis, a statistical evaluation known in the art, can be employed to assess the breadth, or redundancy of, population coverage.

[0220] 4.) When selecting epitopes from cancer-related antigens it is often useful to select analogs because the patient may have developed tolerance to the native epitope. When selecting epitopes for infectious disease-related antigens it is preferable to select either native or analoged epitopes.

[0221] 5.) Of particular relevance are epitopes referred to as “nested epitopes.” Nested epitopes occur where at least two epitopes overlap in a given peptide sequence. A nested peptide sequence can comprise both HLA class I and HLA class II epitopes. When providing nested epitopes, a general objective is to provide the greatest number of epitopes per sequence. Thus, an aspect is to avoid providing a peptide that is any longer than the amino terminus of the amino terminal epitope and the carboxyl terminus of the carboxyl terminal epitope in the peptide. When providing a multi-epitopic sequence, such as a sequence comprising nested epitopes, it is generally important to screen the sequence in order to insure that it does not have pathological or other deleterious biological properties.

[0222] 6.) If a polyepitopic protein is created, or when creating a minigene, an objective is to generate the smallest peptide that encompasses the epitopes of interest. This principle is similar, if not the same as that employed when selecting a peptide comprising nested epitopes. However, with an artificial polyepitopic peptide, the size minimization objective is balanced against the need to integrate any spacer sequences between epitopes in the polyepitopic protein. Spacer amino acid residues can, for example, be introduced to avoid junctional epitopes (an epitope recognized by the immune system, not present in the target antigen, and only created by the man-made juxtaposition of epitopes), or to facilitate cleavage between epitopes and thereby enhance epitope presentation. Junctional epitopes are generally to be avoided because the recipient may generate an immune response to that non-native epitope. Of particular concern is a junctional epitope that is a “dominant epitope.” A dominant epitope may lead to such a zealous response that immune responses to other epitopes are diminished or suppressed.

IV.K.1. Minigene Vaccines

[0223] A number of different approaches are available which allow simultaneous delivery of multiple epitopes. Nucleic acids encoding the peptides of the invention are a particularly useful embodiment of the invention. Epitopes for inclusion in a minigene are preferably selected according to the guidelines set forth in the previous section. A preferred means of administering nucleic acids encoding the peptides of the invention uses minigene constructs encoding a peptide comprising one or multiple epitopes of the invention.

[0224] The use of multi-epitope minigenes is described below and in, e.g., co-pending application U.S. Ser. No. 09/311,784; Ishioka et al., J. Immunol. 162:3915-3925, 1999; An, L. and Whitton, J. L., J. Virol. 71:2292, 1997; Thomson, S. A. et al., J. Immunol. 157:822, 1996; Whitton, J. L. et al., J. Virol. 67:348, 1993; Hanke, R. et al., Vaccine 16:426, 1998. For example, a multi-epitope DNA plasmid encoding supermotif-and/or motif-bearing PSA, PSM, PAP, and hK2 epitopes derived from multiple regions of one or more of the prostate cancer-associated antigens, the PADRE™ universal helper T cell epitope (or multiple HTL epitopes from PSA, PSM, PAP, and hK2), and an endoplasmic reticulum-translocating signal sequence can be engineered. A vaccine may also comprise epitopes that are derived from other TAAs.

[0225] The immunogenicity of a multi-epitopic minigene can be tested in transgenic mice to evaluate the magnitude of CTL induction responses against the epitopes tested. Further, the immunogenicity of DNA-encoded epitopes in vivo can be correlated with the in vitro responses of specific CTL lines against target cells transfected with the DNA plasmid. Thus, these experiments can show that the minigene serves to both: 1.) generate a CTL response and 2.) that the induced CTLs recognized cells expressing the encoded epitopes.

[0226] For example, to create a DNA sequence encoding the selected epitopes (minigene) for expression in human cells, the amino acid sequences of the epitopes may be reverse translated. A human codon usage table can be used to guide the codon choice for each amino acid. These epitope-encoding DNA sequences may be directly adjoined, so that when translated, a continuous polypeptide sequence is created. To optimize expression and/or immunogenicity, additional elements can be incorporated into the minigene design. Examples of amino acid sequences that can be reverse translated and included in the minigene sequence include: HLA class I epitopes, HLA class II epitopes, a ubiquitination signal sequence, and/or an endoplasmic reticulum targeting signal. In addition, HLA presentation of CTL and HTL epitopes may be improved by including synthetic (e.g. poly-alanine) or naturally-occurring flanking sequences adjacent to the CTL or HTL epitopes; these larger peptides comprising the epitope(s) are within the scope of the invention.

[0227] The minigene sequence may be converted to DNA by assembling oligonucleotides that encode the plus and minus strands of the minigene. Overlapping oligonucleotides (30-100 bases long) may be synthesized, phosphorylated, purified and annealed under appropriate conditions using well known techniques. The ends of the oligonucleotides can be joined, for example, using T4 DNA ligase. This synthetic minigene, encoding the epitope polypeptide, can then be cloned into a desired expression vector.

[0228] Standard regulatory sequences well known to those of skill in the art are preferably included in the vector to ensure expression in the target cells. Several vector elements are desirable: a promoter with a down-stream cloning site for minigene insertion; a polyadenylation signal for efficient transcription termination; an E. coli origin of replication; and an E. coli selectable marker (e.g. ampicillin or kanamycin resistance). Numerous promoters can be used for this purpose, e.g., the human cytomegalovirus (hCMV) promoter. See, e.g., U.S. Pat. Nos. 5,580,859 and 5,589,466 for other suitable promoter sequences.

[0229] Additional vector modifications may be desired to optimize minigene expression and immunogenicity. In some cases, introns are required for efficient gene expression, and one or more synthetic or naturally-occurring introns could be incorporated into the transcribed region of the minigene. The inclusion of mRNA stabilization sequences and sequences for replication in mammalian cells may also be considered for increasing minigene expression.

[0230] Once an expression vector is selected, the minigene is cloned into the polylinker region downstream of the promoter. This plasmid is transformed into an appropriate E. coli strain, and DNA is prepared using standard techniques. The orientation and DNA sequence of the minigene, as well as all other elements included in the vector, are confirmed using restriction mapping and DNA sequence analysis. Bacterial cells harboring the correct plasmid can be stored as a master cell bank and a working cell bank.

[0231] In addition, immunostimulatory sequences (ISSs or CpGs) appear to play a role in the immunogenicity of DNA vaccines. These sequences may be included in the vector, outside the minigene coding sequence, if desired to enhance immunogenicity.

[0232] In some embodiments, a bi-cistronic expression vector which allows production of both the minigene-encoded epitopes and a second protein (included to enhance or decrease immunogenicity) can be used. Examples of proteins or polypeptides that could beneficially enhance the immune response if co-expressed include cytokines (e.g., IL-2, IL-12, GM-CSF), cytokine-inducing molecules (e.g., LeIF), costimulatory molecules, or for HTL responses, pan-DR binding proteins (PADRE™, Epimmune, San Diego, Calif.). Helper (HTL) epitopes can be joined to intracellular targeting signals and expressed separately from expressed CTL epitopes; this allows direction of the HTL epitopes to a cell compartment different than that of the CTL epitopes. If required, this could facilitate more efficient entry of HTL epitopes into the HLA class II pathway, thereby improving HTL induction. In contrast to HTL or CTL induction, specifically decreasing the immune response by co-expression of immunosuppressive molecules (e.g. TGF-β) may be beneficial in certain diseases.

[0233] Therapeutic quantities of plasmid DNA can be produced for example, by fermentation in E. coli, followed by purification. Aliquots from the working cell bank are used to inoculate growth medium, and grown to saturation in shaker flasks or a bioreactor according to well known techniques. Plasmid DNA can be purified using standard bioseparation technologies such as solid phase anion-exchange resins supplied by QIAGEN, Inc. (Valencia, Calif.). If required, supercoiled DNA can be isolated from the open circular and linear forms using gel electrophoresis or other methods.

[0234] Purified plasmid DNA can be prepared for injection using a variety of formulations. The simplest of these is reconstitution of lyophilized DNA in sterile phosphate-buffered saline (PBS). This approach, known as “naked DNA,” is currently being used for intramuscular (IM) administration in clinical trials. To maximize the immunotherapeutic effects of minigene DNA vaccines, an alternative method for formulating purified plasmid DNA may be desirable. A variety of methods have been described, and new techniques may become available. Cationic lipids, glycolipids, and fusogenic liposomes can also be used in the formulation (see, e.g., as described by WO 93/24640; Mannino & Gould-Fogerite, BioTechniques 6(7): 682 (1988); U.S. Pat. No. 5,279,833; WO 91/06309; and Felgner, et al., Proc. Nat'l Acad. Sci. USA 84:7413 (1987). In addition, peptides and compounds referred to collectively as protective, interactive, non-condensing compounds (PINC) could also be complexed to purified plasmid DNA to influence variables such as stability, intramuscular dispersion, or trafficking to specific organs or cell types.

[0235] Target cell sensitization can be used as a functional assay for expression and HLA class I presentation of minigene-encoded CTL epitopes. For example, the plasmid DNA is introduced into a mammalian cell line that is suitable as a target for standard CTL chromium release assays. The transfection method used will be dependent on the final formulation. Electroporation can be used for “naked” DNA, whereas cationic lipids allow direct in vitro transfection. A plasmid expressing green fluorescent protein (GFP) can be co-transfected to allow enrichment of transfected cells using fluorescence activated cell sorting (FACS). These cells are then chromium-51 (51 Cr) labeled and used as target cells for epitope-specific CTL lines; cytolysis, detected by ⁵¹Cr release, indicates both production of, and HLA presentation of, minigene-encoded CTL epitopes. Expression of HTL epitopes may be evaluated in an analogous manner using assays to assess HTL activity.

[0236] In vivo immunogenicity is a second approach for functional testing of minigene DNA formulations. Transgenic mice expressing appropriate human HLA proteins are immunized with the DNA product. The dose and route of administration are formulation dependent (e.g., IM for DNA in PBS, intraperitoneal (IP) for lipid-complexed DNA). Twenty-one days after immunization, splenocytes are harvested and restimulated for one week in the presence of peptides encoding each epitope being tested. Thereafter, for CTL effector cells, assays are conducted for cytolysis of peptide-loaded, ⁵¹Cr-labeled target cells using standard techniques. Lysis of target cells that were sensitized by HLA loaded with peptide epitopes, corresponding to minigene-encoded epitopes, demonstrates DNA vaccine function for in vivo induction of CTLs. Immunogenicity of HTL epitopes is evaluated in transgenic mice in an analogous manner.

[0237] Alternatively, the nucleic acids can be administered using ballistic delivery as described, for instance, in U.S. Pat. No. 5,204,253. Using this technique, particles comprised solely of DNA are administered. In a further alternative embodiment, DNA can be adhered to particles, such as gold particles.

[0238] Minigenes can also be delivered using other bacterial or viral delivery systems well known in the art, e.g., an expression construct encoding epitopes of the invention can be incorporated into a viral vector such as vaccinia.

IV.K.2. Combinations of CTL Peptides with Helper Peptides

[0239] Vaccine compositions comprising the peptides of the present invention can be modified to provide desired attributes, such as improved serum half-life, or to enhance immunogenicity.

[0240] For instance, the ability of a peptide to induce CTL activity can be enhanced by linking the peptide to a sequence which contains at least one epitope that is capable of inducing a T helper cell response. The use of T helper epitopes in conjunction with CTL epitopes to enhance immunogenicity is illustrated, for example, in the co-pending applications U.S. Ser. No. 08/820,360, U.S. Ser. No. 08/197,484, and U.S. Ser. No. 08/464,234.

[0241] Although a CTL peptide can be directly linked to a T helper peptide, often CTL epitope/HTL epitope conjugates are linked by a spacer molecule. The spacer is typically comprised of relatively small, neutral molecules, such as amino acids or amino acid mimetics, which are substantially uncharged under physiological conditions. The spacers are typically selected from, e.g., Ala, Gly, or other neutral spacers of nonpolar amino acids or neutral polar amino acids. It will be understood that the optionally present spacer need not be comprised of the same residues and thus may be a hetero- or homo-oligomer. When present, the spacer will usually be at least one or two residues, more usually three to six residues and sometimes 10 or more residues. The CTL peptide epitope can be linked to the T helper peptide epitope either directly or via a spacer either at the amino or carboxy terminus of the CTL peptide. The amino terminus of either the immunogenic peptide or the T helper peptide may be acylated.

[0242] In certain embodiments, the T helper peptide is one that is recognized by T helper cells present in the majority of the population. This can be accomplished by selecting amino acid sequences that bind to many, most, or all of the HLA class II molecules. These are known as “loosely HLA-restricted” or “promiscuous” T helper sequences. Examples of peptides that are promiscuous include sequences from antigens such as tetanus toxoid at positions 830-843 (QYIKANSKFIGITE), Plasmodium falciparum circumsporozoite (CS) protein at positions 378-398 (DIEKKIAKMEKASSVFNVVNS), and Streptococcus 18 kD protein at positions 116 (GAVDSILGGVATYGAA). Other examples include peptides bearing a DR 1-4-7 supermotif, or either of the DR3 motifs.

[0243] Alternatively, it is possible to prepare synthetic peptides capable of stimulating T helper lymphocytes, in a loosely HLA-restricted fashion, using amino acid sequences not found in nature (see, e.g., PCT publication WO 95/07707). These synthetic compounds called Pan-DR-binding epitopes (e.g., PADRE™, Epimmune, Inc., San Diego, Calif.) are designed to most preferrably bind most HLA-DR (human HLA class II) molecules. For instance, a pan-DR-binding epitope peptide having the formula: aKXVAAWTLKAAa, where “X” is either cyclohexylalanine, phenylalanine, or tyrosine, and “a” is either D-alanine or L-alanine, has been found to bind to most HLA-DR alleles, and to stimulate the response of T helper lymphocytes from most individuals, regardless of their HLA type. An alternative of a pan-DR binding epitope comprises all “L” natural amino acids and can be provided in the form of nucleic acids that encode the epitope.

[0244] HTL peptide epitopes can also be modified to alter their biological properties. For example, they can be modified to include D-amino acids to increase their resistance to proteases and thus extend their serum half life, or they can be conjugated to other molecules such as lipids, proteins, carbohydrates, and the like to increase their biological activity. For example, the T helper peptide can be conjugated to one or more palmitic acid chains at either the amino or carboxyl termini.

IV.K.3. Combinations of CTL Peptides with T Cell Priming Agents

[0245] In some embodiments it may be desirable to include in the pharmaceutical compositions of the invention at least one component which primes cytotoxic T lymphocytes. Lipids have been identified as agents capable of priming CTL in vivo against viral antigens. For example, palmitic acid residues can be attached to the ε-and α-amino groups of a lysine residue and then linked, e.g., via one or more linking residues such as Gly, Gly-Gly-, Ser, Ser-Ser, or the like, to an immunogenic peptide. The lipidated peptide can then be administered either directly in a micelle or particle, incorporated into a liposome, or emulsified in an adjuvant, e.g., incomplete Freund's adjuvant. A preferred immunogenic composition comprises palmitic acid attached to ε- and α-amino groups of Lys, which is attached via linkage, e.g., Ser-Ser, to the amino terminus of the immunogenic peptide.

[0246] As another example of lipid priming of CTL responses, E. coli lipoproteins, such as tripalmitoyl-S-glycerylcysteinlyseryl-serine (P₃CSS) can be used to prime virus specific CTL when covalently attached to an appropriate peptide (see, e.g., Deres, et al., Nature 342:561, 1989). Peptides of the invention can be coupled to P₃CSS, for example, and the lipopeptide administered to an individual to specifically prime a CTL response to the target antigen. Moreover, because the induction of neutralizing antibodies can also be primed with P₃CSS-conjugated epitopes, two such compositions can be combined to more effectively elicit both humoral and cell-mediated responses.

[0247] CTL and/or HTL peptides can also be modified by the addition of amino acids to the termini of a peptide to provide for ease of linking peptides one to another, for coupling to a carrier support or larger peptide, for modifying the physical or chemical properties of the peptide or oligopeptide, or the like. Amino acids such as tyrosine, cysteine, lysine, glutamic or aspartic acid, or the like, can be introduced at the C- or N-terminus of the peptide or oligopeptide, particularly class I peptides. However, it is to be noted that modification at the carboxyl terminus of a CTL epitope may, in some cases, alter binding characteristics of the peptide. In addition, the peptide or oligopeptide sequences can differ from the natural sequence by being modified by terminal-NH₂ acylation, e.g., by alkanoyl (C₁-C₂₀) or thioglycolyl acetylation, terminal-carboxyl amidation, e.g., ammonia, methylamine, etc. In some instances these modifications may provide sites for linking to a support or other molecule.

IV.K.4. Vaccine Compositions Comprising DC Pulsed with CTL and/or HTL Peptides

[0248] An embodiment of a vaccine composition in accordance with the invention comprises ex vivo administration of a cocktail of epitope-bearing peptides to PBMC, or isolated DC therefrom, from the patient's blood. A pharmaceutical to facilitate harvesting of DC can be used, such as Progenipoietin™ (Monsanto, St. Louis, Mo.) or GM-CSF/IL-4. After pulsing the DC with peptides and prior to reinfusion into patients, the DC are washed to remove unbound peptides. In this embodiment, a vaccine comprises peptide-pulsed DCs which present the pulsed peptide epitopes complexed with HLA molecules on their surfaces.

[0249] The DC can be pulsed ex vivo with a cocktail of peptides, some of which stimulate CTL response to one or more antigens of interest, e.g., prostate-associated antigens such as PSA, PSM, PAP, kallikrein, and the like. Optionally, a helper T cell peptide such as a PADRE™ family molecule, can be included to facilitate the CTL response.

IV.L. Administration of Vaccines for Therapeutic or Prophylactic Purposes

[0250] The peptides of the present invention and pharmaceutical and vaccine compositions of the invention are typically used therapeutically to treat cancer, particularly prostate cancer. Vaccine compositions containing the peptides of the invention are typically administered to a prostate cancer patient who has a malignancy associated with expression of one or more prostate-associated antigens. Alternatively, vaccine compositions can be administered to an individual susceptible to, or otherwise at risk for developing prostate cancer.

[0251] In therapeutic applications, peptide and/or nucleic acid compositions are administered to a patient in an amount sufficient to elicit an effective CTL and/or HTL response to the tumor antigen and to cure or at least partially arrest or slow symptoms and/or complications. An amount adequate to accomplish this is defined as “therapeutically effective dose.” Amounts effective for this use will depend on, e.g., the particular composition administered, the manner of administration, the stage and severity of the disease being treated, the weight and general state of health of the patient, and the judgment of the prescribing physician.

[0252] As noted above, peptides comprising CTL and/or HTL epitopes of the invention induce immune responses when presented by HLA molecules and contacted with a CTL or HTL specific for an epitope comprised by the peptide. The peptides (or DNA encoding them) can be administered individually or as fusions of one or more peptide sequences. The manner in which the peptide is contacted with the CTL or HTL is not critical to the invention. For instance, the peptide can be contacted with the CTL or HTL either in vivo or in vitro. If the contacting occurs in vivo, the peptide itself can be administered to the patient, or other vehicles, e.g., DNA vectors encoding one or more peptides, viral vectors encoding the peptide(s), liposomes and the like, can be used, as described herein.

[0253] When the peptide is contacted in vitro, the vaccinating agent can comprise a population of cells, e.g., peptide-pulsed dendritic cells, or TAA-specific CTLs, which have been induced by pulsing antigen-presenting cells in vitro with the peptide or by transfecting antigen-presenting cells with a minigene of the invention. Such a cell population is subsequently administered to a patient in a therapeutically effective dose.

[0254] For therapeutic use, administration should generally begin at the first diagnosis of cancer. This is followed by boosting doses until at least symptoms are substantially abated and for a period thereafter. The embodiment of the vaccine composition (i.e., including, but not limited to embodiments such as peptide cocktails, polyepitopic polypeptides, minigenes, or TAA-specific CTLs or pulsed dendritic cells) delivered to the patient may vary according to the stage of the disease or the patient's health status. For example, a vaccine comprising TAA-specific CTLs may be more efficacious in killing tumor cells in patients with advanced disease than alternative embodiments.

[0255] The vaccine compositions of the invention may also be used therapeutically in combination with treatments such as surgery. An example is a situation in which a patient has undergone surgery to remove a primary tumor and the vaccine is then used to slow or prevent recurrence and/or metastasis.

[0256] Where susceptible individuals, e.g., individuals who may be diagnosed as being genetically pre-disposed to developing a prostate tumor, are identified prior to diagnosis of cancer, the composition can be targeted to them, thus minimizing the need for administration to a larger population.

[0257] The dosage for an initial therapeutic immunization generally occurs in a unit dosage range where the lower value is about 1, 5, 50, 500, or 1,000 μg and the higher value is about 10,000; 20,000; 30,000; or 50,000 μg. Dosage values for a human typically range from about 500 μg to about 50,000 μg per 70 kilogram patient. Initial doses followed by boosting doses at established intervals, e.g., from four weeks to six months, may be required, possibly for a prolonged period of time to effectively treat a patient. Boosting dosages of between about 1.0 μg to about 50,000 μg of peptide pursuant to a boosting regimen over weeks to months may be administered depending upon the patient's response and condition as determined by measuring the specific activity of CTL and HTL obtained from the patient's blood.

[0258] Administration should continue until at least clinical symptoms or laboratory tests indicate that the tumor has been eliminated or that the tumor cell burden has been substantially reduced and for a period thereafter. The dosages, routes of administration, and dose schedules are adjusted in accordance with methodologies known in the art.

[0259] In certain embodiments, peptides and compositions of the present invention are employed in serious disease states, that is, life-threatening or potentially life threatening situations. In such cases, as a result of the minimal amounts of extraneous substances and the relative nontoxic nature of the peptides in preferred compositions of the invention, it is possible and may be felt desirable by the treating physician to administer substantial excesses of these peptide compositions relative to these stated dosage amounts.

[0260] The vaccine compositions of the invention can also be used as prophylactic agents. For example, the compositions can be administered to individuals at risk of developing prostate cancer. Generally the dosage for an initial prophylactic immunization generally occurs in a unit dosage range where the lower value is about 1, 5, 50, 500, or 1000 μg and the higher value is about 10,000; 20,000; 30,000; or 50,000 μg. Dosage values for a human typically range from about 500 μg to about 50,000 μg per 70 kilogram patient. This is followed by boosting dosages of between about 1.0 μg to about 50,000 μg of peptide administered at defined intervals from about four weeks to six months after the initial administration of vaccine. The immunogenicity of the vaccine may be assessed by measuring the specific activity of CTL and HTL obtained from a sample of the patient's blood.

[0261] The pharmaceutical compositions for therapeutic treatment are intended for parenteral, topical, oral, intrathecal, or local administration. Preferably, the pharmaceutical compositions are administered parentally, e.g., intravenously, subcutaneously, intradermally, or intramuscularly. Thus, the invention provides compositions for parenteral administration which comprise a solution of the immunogenic peptides dissolved or suspended in an acceptable carrier, preferably an aqueous carrier. A variety of aqueous carriers may be used, e.g., water, buffered water, 0.8% saline, 0.3% glycine, hyaluronic acid and the like. These compositions may be sterilized by conventional, well known sterilization techniques, or may be sterile filtered. The resulting aqueous solutions may be packaged for use as is, or lyophilized, the lyophilized preparation being combined with a sterile solution prior to administration. The compositions may contain pharmaceutically acceptable auxiliary substances as required to approximate physiological conditions, such as pH-adjusting and buffering agents, tonicity adjusting agents, wetting agents, preservatives, and the like, for example, sodium acetate, sodium lactate, sodium chloride, potassium chloride, calcium chloride, sorbitan monolaurate, triethanolamine oleate, etc.

[0262] The concentration of peptides of the invention in the pharmaceutical formulations can vary widely, i.e., from less than about 0.1%, usually at or at least about 2% to as much as 20% to 50% or more by weight, and will be selected primarily by fluid volumes, viscosities, etc., in accordance with the particular mode of administration selected.

[0263] A human unit dose form of the peptide composition is typically included in a pharmaceutical composition that comprises a human unit dose of an acceptable carrier, preferably an aqueous carrier, and is administered in a volume of fluid that is known by those of skill in the art to be used for administration of such compositions to humans (see, e.g., Remington's Pharmaceutical Sciences, 17^{th} Edition, A. Gennaro, Editor, Mack Publishing Co., Easton, Pa., 1985).

[0264] The peptides of the invention may also be administered via liposomes, which serve to target the peptides to a particular tissue, such as lymphoid tissue, or to target selectively to infected cells, as well as to increase the half-life of the peptide composition. Liposomes include emulsions, foams, micelles, insoluble monolayers, liquid crystals, phospholipid dispersions, lamellar layers and the like. In these preparations, the peptide to be delivered is incorporated as part of a liposome, alone or in conjunction with a molecule which binds to a receptor prevalent among lymphoid cells, such as monoclonal antibodies which bind to the CD45 antigen, or with other therapeutic or immunogenic compositions. Thus, liposomes either filled or decorated with a desired peptide of the invention can be directed to the site of lymphoid cells, where the liposomes then deliver the peptide compositions. Liposomes for use in accordance with the invention are formed from standard vesicle-forming lipids, which generally include neutral and negatively charged phospholipids and a sterol, such as cholesterol. The selection of lipids is generally guided by consideration of, e.g., liposome size, acid lability and stability of the liposomes in the blood stream. A variety of methods are available for preparing liposomes, as described in, e.g., Szoka, et al., Ann. Rev. Biophys. Bioeng. 9:467 (1980), and U.S. Pat. Nos. 4,235,871, 4,501,728, 4,837,028, and 5,019,369.

[0265] For targeting cells of the immune system, a ligand to be incorporated into the liposome can include, e.g., antibodies or fragments thereof specific for cell surface determinants of the desired immune system cells. A liposome suspension containing a peptide may be administered intravenously, locally, topically, etc. in a dose which varies according to, inter alia, the manner of administration, the peptide being delivered, and the stage of the disease being treated.

[0266] For solid compositions, conventional nontoxic solid carriers may be used which include, for example, pharmaceutical grades of mannitol, lactose, starch, magnesium stearate, sodium saccharin, talcum, cellulose, glucose, sucrose, magnesium carbonate, and the like. For oral administration, a pharmaceutically acceptable nontoxic composition is formed by incorporating any of the normally employed excipients, such as those carriers previously listed, and generally 10-95% of active ingredient, that is, one or more peptides of the invention, and more preferably at a concentration of 25%-75%.

[0267] For aerosol administration, the immunogenic peptides are preferably supplied in finely divided form along with a surfactant and propellant. Typical percentages of peptides are 0.01%-20% by weight, preferably 1%-10%. The surfactant must, of course, be nontoxic, and preferably soluble in the propellant. Representative of such agents are the esters or partial esters of fatty acids containing from 6 to 22 carbon atoms, such as caproic, octanoic, lauric, palmitic, stearic, linoleic, linolenic, olesteric and oleic acids with an aliphatic polyhydric alcohol or its cyclic anhydride. Mixed esters, such as mixed or natural glycerides may be employed. The surfactant may constitute 0.1%-20% by weight of the composition, preferably 0.25-5%. The balance of the composition is ordinarily propellant. A carrier can also be included, as desired, as with, e.g., lecithin for intranasal delivery.

IV.M. Kits

[0268] The peptide and nucleic acid compositions of this invention can be provided in kit form together with instructions for vaccine administration. Typically the kit would include desired peptide compositions in a container, preferably in unit dosage form and instructions for administration. An alternative kit would include a minigene construct with desired nucleic acids of the invention in a container, preferably in unit dosage form together with instructions for administration. Lymphokines such as IL-2 or IL-12 may also be included in the kit. Other kit components that may also be desirable include, for example, a sterile syringe, booster dosages, and other desired excipients.

[0269] Epitopes in accordance with the present invention were successfully used to induce an immune response. Immune responses with these epitopes have been induced by administering the epitopes in various forms. The epitopes have been administered as peptides, as nucleic acids, and as viral vectors comprising nucleic acids that encode the epitope(s) of the invention. Upon administration of peptide-based epitope forms, immune responses have been induced by direct loading of an epitope onto an empty HLA molecule that is expressed on a cell, and via internalization of the epitope and processing via the HLA class I pathway; in either event, the HLA molecule expressing the epitope was then able to interact with and induce a CTL response. Peptides can be delivered directly or using such agents as liposomes. They can additionally be delivered using ballistic delivery, in which the peptides are typically in a crystalline form. When DNA is used to induce an immune response, it is administered either as naked DNA, generally in a dose range of approximately 1-5 mg, or via the ballistic “gene gun” delivery, typically in a dose range of approximately 10-100 μg. The DNA can be delivered in a variety of conformations, e.g., linear, circular etc. Various viral vectors have also successfully been used that comprise nucleic acids which encode epitopes in accordance with the invention.

[0270] Accordingly compositions in accordance with the invention exist in several forms. Embodiments of each of these composition forms in accordance with the invention have been successfully used to induce an immune response.

[0271] One composition in accordance with the invention comprises a plurality of peptides. This plurality or cocktail of peptides is generally admixed with one or more pharmaceutically acceptable excipients. The peptide cocktail can comprise multiple copies of the same peptide or can comprise a mixture of peptides. The peptides can be analogs of naturally occurring epitopes. The peptides can comprise artificial amino acids and/or chemical modifications such as addition of a surface active molecule, e.g., lipidation; acetylation, glycosylation, biotinylation, phosphorylation etc. The peptides can be CTL or HTL epitopes. In a preferred embodiment the peptide cocktail comprises a plurality of different CTL epitopes and at least one HTL epitope. The HTL epitope can be naturally or non-naturally (e.g., PADRE®, Epimmune Inc., San Diego, Calif.). The number of distinct epitopes in an embodiment of the invention is generally a whole unit integer from one through one hundred fifty (e.g., 1, 2, 3, 4, 5, 6, 7, 8, 9, 10, 11, 12, 13, 14, 15, 16, 17, 18, 19, 20, 21, 22, 23, 24, 25, 26, 27, 28, 29, 30, 31, 32, 33, 34, 35, 36, 37, 38, 39, 40, 41, 42, 43, 44, 45, 46, 47, 48, 49, 50, 51, 52, 53, 54, 55, 56, 57, 58, 59, 60, 61, 62, 63, 64, 65, 66, 67, 68, 69, 70, 71, 72, 73, 74, 75, 76, 77, 78, 79, 80, 81, 82, 83, 84, 85, 86, 87, 88, 89, 90, 91, 92, 93, 94, 95, 96, 97, 98, 99, or, 100).

[0272] An additional embodiment of a composition in accordance with the invention comprises a polypeptide multi-epitope construct, i.e., a polyepitopic peptide. Polyepitopic peptides in accordance with the invention are prepared by use of technologies well-known in the art. By use of these known technologies, epitopes in accordance with the invention are connected one to another. The polyepitopic peptides can be linear or non-linear, e.g., multivalent. These polyepitopic constructs can comprise artificial amino acids, spacing or spacer amino acids, flanking amino acids, or chemical modifications between adjacent epitope units. The polyepitopic construct can be a heteropolymer or a homopolymer. The polyepitopic constructs generally comprise epitopes in a quantity of any whole unit integer between 2-150 (e.g., 2, 3, 4, 5, 6, 7, 8, 9, 10, 11, 12, 13, 14, 15, 16, 17, 18, 19, 20, 21, 22, 23, 24, 25, 26, 27, 28, 29, 30, 31, 32, 33, 34, 35, 36, 37, 38, 39, 40, 41, 42, 43, 44, 45, 46, 47, 48, 49, 50, 51, 52, 53, 54, 55, 56, 57, 58, 59, 60, 61, 62, 63, 64, 65, 66, 67, 68, 69, 70, 71, 72, 73, 74, 75, 76, 77, 78, 79, 80, 81, 82, 83, 84, 85, 86, 87, 88, 89, 90, 91, 92, 93, 94, 95, 96, 97, 98, 99, or, 100). The polyepitopic construct can comprise CTL and/or HTL epitopes. One or more of the epitopes in the construct can be modified, e.g., by addition of a surface active material, e.g. a lipid, or chemically modified, e.g., acetylation, etc. Moreover, bonds in the multiepitopic construct can be other than peptide bonds, e.g., covalent bonds, ester or ether bonds, disulfide bonds, hydrogen bonds, ionic bonds etc.

[0273] Alternatively, a composition in accordance with the invention comprises construct which comprises a series, sequence, stretch, etc., of amino acids that have homology to (i.e., corresponds to or is contiguous with) to a native sequence. This stretch of amino acids comprises at least one subsequence of amino acids that, if cleaved or isolated from the longer series of amino acids, functions as an HLA class I or HLA class II epitope in accordance with the invention. In this embodiment, the peptide sequence is modified, so as to become a construct as defined herein, by use of any number of techniques known or to be provided in the art. The polyepitopic constructs can contain homology to a native sequence in any whole unit integer increment from 70-100%, e.g., 70, 71, 72, 73, 74, 75, 76, 77, 78, 79, 80, 81, 82, 83, 84, 85, 86, 87, 88, 89, 90, 91, 92, 93, 94, 95, 96, 97, 98, 99, or, 100 percent.

[0274] A further embodiment of a composition in accordance with the invention is an antigen presenting cell that comprises one or more epitopes in accordance with the invention. The antigen presenting cell can be a “professional” antigen presenting cell, such as a dendritic cell. The antigen presenting cell can comprise the epitope of the invention by any means known or to be determined in the art. Such means include pulsing of dendritic cells with one or more individual epitopes or with one or more peptides that comprise multiple epitopes, by nucleic acid administration such as ballistic nucleic acid delivery or by other techniques in the art for administration of nucleic acids, including vector-based, e.g. viral vector, delivery of nucleic acids.

[0275] Further embodiments of compositions in accordance with the invention comprise nucleic acids that encode one or more peptides of the invention, or nucleic acids which encode a polyepitopic peptide in accordance with the invention. As appreciated by one of ordinary skill in the art, various nucleic acids compositions will encode the same peptide due to the redundancy of the genetic code. Each of these nucleic acid compositions falls within the scope of the present invention. This embodiment of the invention comprises DNA or RNA, and in certain embodiments a combination of DNA and RNA. It is to be appreciated that any composition comprising nucleic acids that will encode a peptide in accordance with the invention or any other peptide based composition in accordance with the invention, falls within the scope of this invention.

[0276] It is to be appreciated that peptide-based forms of the invention (as well as the nucleic acids that encode them) can comprise analogs of epitopes of the invention generated using priniciples already known, or to be known, in the art. Principles related to analoging are now known in the art, and are disclosed herein; moreover, analoging principles (heteroclitic analoging) are disclosed in co-pending application serial number U.S. Ser. No. 09/226,775 filed 6 Jan. 1999. Generally the compositions of the invention are isolated or purified.

[0277] The invention will be described in greater detail by way of specific examples. The following examples are offered for illustrative purposes, and are not intended to limit the invention in any manner. Those of skill in the art will readily recognize a variety of non-critical parameters that can be changed or modified to yield alternative embodiments in accordance with the invention.

### V. EXAMPLES

[0278] The following examples illustrate identification, selection, and use of immunogenic Class I and Class II peptide epitopes for inclusion in vaccine compositions.

### Example 1

### HLA Class I and Class II Binding Assays

[0279] The following example of peptide binding to HLA molecules demonstrates quantification of binding affinities of HLA class I and class II peptides. Binding assays can be performed with peptides that are either motif-bearing or not motif-bearing.

[0280] Cell lysates were prepared and HLA molecules purified in accordance with disclosed protocols (Sidney et al., Current Protocols in Immunology 18.3.1 (1998); Sidney, et al., J. Immunol. 154:247 (1995); Sette, et al., Mol. Immunol. 31:813 (1994)). cells/ml in 50 mM Tris. The cell lines used as sources of HLA molecules and the antibodies used for the extraction of the HLA molecules from the cell lysates are also described in these publications.

[0281] Epstein-Barr virus (EBV)-transformed homozygous cell lines, fibroblasts, CIR, or 721.221-transfectants were used as sources of HLA class I molecules. These cells were maintained in vitro by culture in RPMI 1640 medium supplemented with 2 mM L-glutamine (GIBCO, Grand Island, N.Y.), 50 μM 2-ME, 100 μg/ml of streptomycin, 100 U/ml of penicillin (Irvine Scientific) and 10% heat-inactivated FCS (Irvine Scientific, Santa Ana, Calif.). Cells were grown in 225-cm² tissue culture flasks or, for large-scale cultures, in roller bottle apparatuses.

[0282] Cell lysates were prepared and HLA molecules purified in accordance with disclosed protocols (Sidney et al., Current Protocols in Immunology 18.3.1 (1998); Sidney, et al., J. Immunol. 154:247 (1995); Sette, et al., Mol. Immunol. 31:813 (1994)). Briefly, cells were lysed at a concentration of 10⁸ cells/ml in 50 mM Tris-HCl, pH 8.5, containing 1% Nonidet P-40 (Fluka Biochemika, Buchs, Switzerland), 150 mM NaCl, 5 mM EDTA, and 2 mM PMSF. Lysates were cleared of debris and nuclei by centrifugation at 15,000×g for 30 min.

[0283] HLA molecules were purified from lysates by affinity chromatography. Lysates prepared as above were passed twice through two pre-columns of inactivated Sepharose CL-4-B and protein A-Sepharose. Next, the lysate was passed over a column of Sepharose CL-4B beads coupled to an appropriate antibody. The anti-HLA column was then washed with 10-column volumes of 10 mM Tris-HCL, pH 8.0, in 1% NP-40, PBS, 2-column volumes of PBS, and 2-column volumes of PBS containing 0.4% n-octylglucoside. Finally, MHC molecules were eluted with 50 mM diethylamine in 0.15M NaCl containing 0.4% n-octylglucoside, pH 11.5. A 1/25 volume of 2.0M Tris, pH 6.8, was added to the eluate to reduce the pH to ˜8.0. Eluates were then concentrated by centrifugation in Centriprep 30 concentrators at 2000 rpm (Amicon, Beverly, Mass.). Protein content was evaluated by a BCA protein assay (Pierce Chemical Co., Rockford, Ill.) and confirmed by SDS-PAGE.

[0284] A detailed description of the protocol utilized to measure the binding of peptides to Class I and Class II MHC has been published (Sette et al., Mol. Immunol. 31:813, 1994; Sidney et al., in Current Protocols in Immunology, Margulies, Ed., John Wiley & Sons, New York, Section 18.3, 1998). Briefly, purified MHC molecules (5 to 500 nM) were incubated with various unlabeled peptide inhibitors and 1-10 nM ¹²⁵I-radiolabeled probe peptides for 48 h in PBS containing 0.05% Nonidet P-40 (NP40) (or 20% w/v digitonin for H-2 IA assays) in the presence of a protease inhibitor cocktail. The final concentrations of protease inhibitors (each from CalBioChem, La Jolla, Calif.) were 1 mM PMSF, 1.3 nM 1.10 phenanthroline, 73 μM pepstatin A, 8 mM EDTA, 6 mM N-ethylmaleimide (for Class II assays), and 200 μM N alpha-p-tosyl-L-lysine chloromethyl ketone (TLCK). All assays were performed at pH 7.0 with the exception of DRB1*0301, which was performed at pH 4.5, and DRB1*1601 (DR2w21β₁) and DRB4*0101 (DRw53), which were performed at pH 5.0. pH was adjusted as described elsewhere (see Sidney et al., in Current Protocols in Immunology, Margulies, Ed., John Wiley & Sons, New York, Section 18.3, 1998).

[0285] Following incubation, MHC-peptide complexes were separated from free peptide by gel filtration on 7.8 mm×15 cm TSK200 columns (TosoHaas 16215, Montgomeryville, Pa.), eluted at 1.2 mls/min with PBS pH 6.5 containing 0.5% NP40 and 0.1% NaN₃. Because the large size of the radiolabeled peptide used for the DRB1*1501 (DR2w2β₁) assay makes separation of bound from unbound peaks more difficult under these conditions, all DRB1*1501 (DR2w2 μl) assays were performed using a 7.8 mm×30 cm TSK2000 column eluted at 0.6 mls/min. The eluate from the TSK columns was passed through a Beckman 170 radioisotope detector, and radioactivity was plotted and integrated using a Hewlett-Packard 3396A integrator, and the fraction of peptide bound was determined.

[0286] Radiolabeled peptides were iodinated using the chloramine-T method. Representative radiolabeled probe peptides utilized in each assay, and its assay specific IC₅₀ nM, are summarized in Tables IV and V. Typically, in preliminary experiments, each MHC preparation was titered in the presence of fixed amounts of radiolabeled peptides to determine the concentration of HLA molecules necessary to bind 10-20% of the total radioactivity. All subsequent inhibition and direct binding assays were performed using these HLA concentrations.

[0287] Since under these conditions [label]<[HLA] and IC₅₀>[HLA], the measured IC₅₀ values are reasonable approximations of the true K_{D} values. Peptide inhibitors are typically tested at concentrations ranging from 120 μg/ml to 1.2 ng/ml, and are tested in two to four completely independent experiments. To allow comparison of the data obtained in different experiments, a relative binding figure is calculated for each peptide by dividing the IC₅₀ of a positive control for inhibition by the IC₅₀ for each tested peptide (typically unlabeled versions of the radiolabeled probe peptide). For inter-experiment comparisons, relative binding values are compiled. These values can subsequently be converted back into IC₅₀ nM values by dividing the IC₅₀ nM of the positive controls for inhibition by the relative binding of the peptide of interest. This method of data compilation has proven to be the most accurate and consistent for comparing peptides that have been tested on different days, or with different lots of purified MHC.

[0288] Because the antibody used for HLA-DR purification (LB3.1) is α-chain specific, β₁ molecules are not separated from β₃ (and/or β₄ and β₅) molecules. The β₁ specificity of the binding assay is obvious in the cases of DRB1*0101 (DR1), DRB1*0802 (DR8w2), and DRB1*0803 (DR8w3), where no 3 is expressed. It has also been demonstrated for DRB1*0301 (DR3) and DRB3*0101 (DR52a), DRB1*0401 (DR4w4), DRB1*0404 (DR4w14), DRB1*0405 (DR4w15), DRB1*1101 (DR5), DRB1*1201 (DR5w12), DRB1*1302 (DR6w19) and DRB1*0701 (DR7). The problem of β chain specificity for DRB1*1501 (DR2w2β₁), DRB5*0101 (DR2w2β₂), DRB1*1601 (DR2w21β₁), DRB5*0201 (DR51Dw21), and DRB4*0101 (DRw53) assays is circumvented by the use of fibroblasts. Development and validation of assays with regard to DRβ molecule specificity have been described previously (see, e.g., Southwood et al., J. Immunol. 160:3363-3373, 1998).

[0289] Binding assays as outlined above may be used to analyze supermotif and/or motif-bearing epitopes as, for example, described in Example 2.

### Example 2

### Identification of HLA Supermotif- and Motif-Bearing CTL Candidate Epitopes

[0290] Vaccine compositions of the invention may include multiple epitopes that comprise multiple HLA supermotifs or motifs to achieve broad population coverage. This example illustrates the identification of supermotif- and motif-bearing epitopes for the inclusion in such a vaccine composition. Calculation of population coverage is performed using the strategy described below.

Computer Searches and Algorthims for Identification of Supermotif and/or Motif-Bearing Epitopes

[0291] The searches performed to identify the motif-bearing peptide sequences in Examples 2 and 5 employ protein sequence data for prostate cancer-associated antigens.

[0292] Computer searches for epitopes bearing HLA Class I or Class II supermotifs or motifs were performed as follows. All translated protein sequences were analyzed using a text string search software program, e.g., MotifSearch 1.4 (D. Brown, San Diego) to identify potential peptide sequences containing appropriate HLA binding motifs; alternative programs are readily produced in accordance with information in the art in view of the motif/supermotif disclosure herein. Furthermore, such calculations can be made mentally.

[0293] Identified A2-, A3-, and DR-supermotif sequences were scored using polynomial algorithms to predict their capacity to bind to specific HLA-Class I or Class II molecules. These polynomial algorithms take into account both extended and refined motifs (that is, to account for the impact of different amino acids at different positions), and are essentially based on the premise that the overall affinity (or ΔG) of peptide-HLA molecule interactions can be approximated as a linear polynomial function of the type:
“ΔG”=a₁ᵢ×a₂ᵢ×a₃ᵢ . . . ×aₙᵢ
where aⱼᵢ is a coefficient which represents the effect of the presence of a given amino acid (i) at a given position (i) along the sequence of a peptide of n amino acids. The crucial assumption of this method is that the effects at each position are essentially independent of each other (i.e., independent binding of individual side-chains). When residue j occurs at position i in the peptide, it is assumed to contribute a constant amount jᵢ to the free energy of binding of the peptide irrespective of the sequence of the rest of the peptide. This assumption is justified by studies from our laboratories that demonstrated that peptides are bound to MHC and recognized by T cells in essentially an extended conformation (data omitted herein).

[0294] The method of derivation of specific algorithm coefficients has been described in Gulukota et al., J. Mol. Biol. 267:1258-126, 1997; (see also Sidney et al., Human Immunol. 45:79-93, 1996; and Southwood et al., J. Immunol. 160:3363-3373, 1998). Briefly, for all i positions, anchor and non-anchor alike, the geometric mean of the average relative binding (ARB) of all peptides carrying j is calculated relative to the remainder of the group, and used as the estimate of jᵢ. For Class II peptides, if multiple alignments are possible, only the highest scoring alignment is utilized, following an iterative procedure. To calculate an algorithm score of a given peptide in a test set, the ARB values corresponding to the sequence of the peptide are multiplied. If this product exceeds a chosen threshold, the peptide is predicted to bind. Appropriate thresholds are chosen as a function of the degree of stringency of prediction desired.

Selection of HLA-A2 Supertype Cross-Reactive Peptides

[0295] The complete protein sequences of the prostate cancer-associated antigens PAP, PSA, PSM, and hK2 were obtained from GenBank and scanned, utilizing motif identification software, to identify 8-, 9-, 10-, and 11-mer sequences containing the HLA-A2-supermotif main anchor specificity.

[0296] HLA-A2 supermotif-bearing sequences are shown in Table VII. These sequences are then scored using the A2 algorithm and the peptides corresponding to the positive-scoring sequences are synthesized and tested for their capacity to bind purified HLA-A*0201 molecules in vitro (HLA-A*0201 is considered a prototype A2 supertype molecule).

[0297] Examples of peptides that were identified that bind to HLA-A*0201 with IC₅₀ values ≦500 nM are shown in Tables XXII and XXIII. These peptides were then tested for the capacity to bind to additional A2-supertype molecules (A*0202, A*0203, A*0206, and A*6802). Peptides that bind to at least three of the five A2-supertype alleles tested are deemed A2-supertype cross-reactive binders. Preferred peptides bind at an affinity equal to or less than 500 nM to three or more HLA-A2 supertype molecules. Examples of such peptides are set out in Table XXIII. (Due to the homology described above, a number of CTL and HTL epitopes are represented in both the PSA and hK2 antigens. This is represented in Tables XXIII and XXIV by the headings source and alternate source.)

Selection of HLA-A3 Supermotif-Bearing Epitopes

[0298] The protein sequences scanned above were also examined for the presence of peptides with the HLA-A3-supermotif primary anchors using methodology similar to that performed to identify HLA-A2 supermotif-bearing epitopes.

[0299] Peptides corresponding to the supermotif-bearing sequences are then synthesized and tested for binding to HLA-A*0301 and HLA-A*1101 molecules, the two most prevalent A3-supertype alleles. The peptides that are found to bind one of the two alleles with binding affinities of ≦500 nM, preferably ≦200 nM, are then tested for binding cross-reactivity to the other common A3-supertype alleles (A*3101, A*3301, and A*6801) to identify those that can bind at least three of the five HLA-A3-supertype molecules tested.

Selection of HLA-B7 Supermotif Bearing Epitopes

[0300] The same target antigen protein sequences were also analyzed to identify HLA-B7-supermotif-bearing sequences. The corresponding peptides are then synthesized and tested for binding to HLA-B*0702, the most common B7-supertype allele (i.e., the prototype B7 supertype allele). Those peptides that bind B*0702 with IC₅₀ of ≦500 nM, preferably ≦200 nM, are then tested for binding to other common B7-supertype molecules (B*3501, B*5101, B*5301, and B*5401) to identify those peptides that are capable of binding to three or more of the five B7-supertype alleles tested.

Selection of A1 and A24 Motif-Bearing Epitopes

[0301] To further increase population coverage, HLA-A1 and -A24 epitopes can also be incorporated into vaccine constructs. An analysis of the protein sequence data from the target antigens utilized above was performed to identify HLA-A1- and A24-motif-containing sequences. Peptides are then synthesized and tested for binding.

[0302] Peptides that bear other supermotifs and/or motifs can be assessed for binding or cross-reactive binding in an analogous manner.

### Example 3

### Confirmation of Immunogenicity

[0303] Cross-reactive candidate CTL A2-supermotif-bearing peptides that are identified as described in Example 2 were selected for in vitro immunogenicity testing. Examples of immunogenic HLA-A2 cross-reactive binding peptides that bind to at least 3/5 HLA-A2 supertype family members at an IC₅₀ of 200 nM or less are shown in Table XXV. Testing was performed using the following methodology:

Target Cell Lines for Cellular Screening:

[0304] The 0.221A2.1 cell line, produced by transferring the HLA-A2.1 gene into the HLA-A, -B, -C null mutant human B-lymphoblastoid cell line 721.221, is used as the peptide-loaded target to measure activity of HLA-A2.1-restricted CTL. This cell line is grown in RPMI-1640 medium supplemented with antibiotics, sodium pyruvate, nonessential amino acids and 10% (v/v) heat inactivated FCS. Cells that express an antigen of interest, or transfectants comprising the gene encoding the antigen of interest, can be used as target cells to test the ability of peptide-specific CTLs to recognize endogenous antigen.

Primary CTL Induction Cultures:

[0305] Generation of Dendritic Cells (DC): PBMCs are thawed in RPMI with 30 μg/ml DNAse, washed twice and resuspended in complete medium (RPMI-1640 plus 5% AB human serum, non-essential amino acids, sodium pyruvate, L-glutamine and penicillin/strpetomycin). The monocytes are purified by plating 10×10⁶ PBMC/well in a 6-well plate. After 2 hours at 37° C., the non-adherent cells are removed by gently shaking the plates and aspirating the supernatants. The wells are washed a total of three times with 3 ml RPMI to remove most of the non-adherent and loosely adherent cells. Three ml of complete medium containing 50 ng/ml of GM-CSF and 1,000 U/ml of IL-4 are then added to each well. TNFα is added to the DCs on day 6 at 75 ng/ml and the cells are used for CTL induction cultures on day 7.

[0306] Induction of CTL with DC and Peptide: CD8+ T-cells are isolated by positive selection with Dynal immunomagnetic beads (Dynabeads® M-450) and the detacha-bead® reagent. Typically about 200-250×10⁶ PBMC are processed to obtain 24×10⁶ CD8⁺T-cells (enough for a 48-well plate culture). Briefly, the PBMCs are thawed in RPMI with 30 μg/ml DNAse, washed once with PBS containing 1% human AB serum and resuspended in PBS/1% AB serum at a concentration of 20×10⁶ cells/ml. The magnetic beads are washed 3 times with PBS/AB serum, added to the cells (140 μl beads/20×10⁶ cells) and incubated for 1 hour at 4° C. with continuous mixing. The beads and cells are washed 4× with PBS/AB serum to remove the nonadherent cells and resuspended at 100×10⁶ cells/ml (based on the original cell number) in PBS/AB serum containing 100 μl/ml detacha-bead® reagent and 30 μg/ml DNAse. The mixture is incubated for 1 hour at room temperature with continuous mixing. The beads are washed again with PBS/AB/DNAse to collect the CD8+ T-cells. The DC are collected and centrifuged at 1300 rpm for 5-7 minutes, washed once with PBS with 1% BSA, counted and pulsed with 40 μg/ml of peptide at a cell concentration of 1-2×10⁶/ml in the presence of 3 μg/ml B₂-microglobulin for 4 hours at 20° C. The DC are then irradiated (4,200 rads), washed 1 time with medium and counted again.

[0307] Setting up induction cultures: 0.25 ml cytokine-generated DC (@1×10⁵ cells/ml) are co-cultured with 0.25 ml of CD8+ T-cells (@2×10⁶ cell/ml) in each well of a 48-well plate in the presence of 10 ng/ml of IL-7. Recombinant human IL10 is added the next day at a final concentration of 10 ng/ml and rhuman IL2 is added 48 hours later at 10 IU/ml.

[0308] Restimulation of the induction cultures with peptide-pulsed adherent cells: Seven and fourteen days after the primary induction the cells are restimulated with peptide-pulsed adherent cells. The PBMCS are thawed and washed twice with RPMI and DNAse. The cells are resuspended at 5×10⁶ cells/ml and irradiated at ˜4200 rads. The PBMCs are plated at 2×10⁶ in 0.5 ml complete medium per well and incubated for 2 hours at 37° C. The plates are washed twice with RPMI by tapping the plate gently to remove the nonadherent cells and the adherent cells pulsed with 10 μg/ml of peptide in the presence of 3 μg/ml β₂ microglobulin in 0.25 ml RPMI/5% AB per well for 2 hours at 37° C. Peptide solution from each well is aspirated and the wells are washed once with RPMI. Most of the media is aspirated from the induction cultures (CD8+ cells) and brought to 0.5 ml with fresh media. The cells are then transferred to the wells containing the peptide-pulsed adherent cells. Twenty four hours later rhuman IL10 is added at a final concentration of 10 ng/ml and rhuman IL2 is added the next day and again 2-3 days later at 50 IU/ml (Tsai et al., Critical Reviews in Immunology 18(1-2):65-75, 1998). Seven days later the cultures are assayed for CTL activity in a ⁵¹Cr release assay. In some experiments the cultures are assayed for peptide-specific recognition in the in situ IFNγ ELISA at the time of the second restimulation followed by assay of endogenous recognition 7 days later. After expansion, activity is measured in both assays for a side by side comparison.

Measurement of CTL Lytic Activity by ⁵¹Cr Release.

[0309] Seven days after the second restimulation, cytotoxicity is determined in a standard (5 hr) ⁵¹Cr release assay by assaying individual wells at a single E:T. Peptide-pulsed targets are prepared by incubating the cells with 10 g/ml peptide overnight at 37° C.

[0310] Adherent target cells are removed from culture flasks with trypsin-EDTA. Target cells are labelled with 200 μCi of ⁵¹Cr sodium chromate (Dupont, Wilmington, Del.) for 1 hour at 37° C. Labelled target cells are resuspended at 10⁶ per ml and diluted 1:10 with K562 cells at a concentration of 3.3×10⁶/ml (an NK-sensitive erythroblastoma cell line used to reduce non-specific lysis). Target cells (100 μl) and 10011 of effectors are plated in 96 well round-bottom plates and incubated for 5 hours at 37° C. At that time, 100 μl of supernatant are collected from each well and percent lysis is determined according to the formula: [(cpm of the test sample-cpm of the spontaneous ⁵¹Cr release sample)/(cpm of the maximal ⁵¹Cr release sample-cpm of the spontaneous ⁵¹Cr release sample)]×100. Maximum and spontaneous release are determined by incubating the labelled targets with 1% Trition X-100 and media alone, respectively. A positive culture is defined as one in which the specific lysis (sample-background) is 10% or higher in the case of individual wells and is 15% or more at the 2 highest E:T ratios when expanded cultures are assayed.

In Situ Measurement of Human γIFN Production as an Indicator of Peptide-Specific and Endogenous Recognition

[0311] Immulon 2 plates are coated with mouse anti-human IFNγ monoclonal antibody (4 μg/ml 0.1M NaHCO₃, pH8.2) overnight at 4° C. The plates are washed with Ca²⁺, Mg²⁺-free PBS/0.05% Tween 20 and blocked with PBS/10% FCS for 2 hours, after which the CTLs (100 μl/well) and targets (100 μl/well) are added to each well, leaving empty wells for the standards and blanks (which received media only). The target cells, either peptide-pulsed or endogenous targets, are used at a concentration of 1×10⁶ cells/ml. The plates are incubated for 48 hours at 37° C. with 5% CO₂.

[0312] Recombinant human IFNγ is added to the standard wells starting at 400 pg or 1200 pg/100 μl/well and the plate incubated for 2 hours at 37° C. The plates are washed and 100 μl of biotinylated mouse anti-human IFNγ monoclonal antibody (2 μg/ml in PBS/3% FCS/0.05% Tween 20) are added and incubated for 2 hours at room temperature. After washing again, 100 μl HRP-streptavidin (1:4000) are added and the plates incubated for 1 hour at room temperature. The plates are then washed 6× with wash buffer, 100 μl/well developing solution (TMB 1:1) are added, and the plates allowed to develop for 5-15 minutes. The reaction is stopped with 50 μl/well 1M H₃PO₄ and read at OD450. A culture is considered positive if it measured at least 50 pg of IFNγ/well above background and is twice the background level of expression.

[0313] CTL Expansion. Those cultures that demonstrate specific lytic activity against peptide-pulsed targets and/or tumor targets are expanded over a two week period with anti-CD3. Briefly, 5×10⁴ CD8+ cells are added to a T25 flask containing the following: 1×10⁶ irradiated (4,200 rad) PBMC (autologous or allogeneic) per ml, 2×10⁵ irradiated (8,000 rad) EBV-transformed cells per ml, and OKT3 (anti-CD3) at 30 ng per ml in RPMI-1640 containing 10% (v/v) human AB serum, non-essential amino acids, sodium pyruvate, 25 μM 2-mercaptoethanol, L-glutamine and penicillin/streptomycin. Rhuman IL2 is added 24 hours later at a final concentration of 200 IU/ml and every 3 days thereafter with fresh media at 50 IU/ml. The cells are split if the cell concentration exceeded 1×10⁶/ml and the cultures are assayed between days 13 and 15 at E:T ratios of 30, 10, 3 and 1:1 in the ⁵¹Cr release assay or at 1×10⁶/ml in the in situ IFNγ assay using the same targets as before the expansion.

[0314] Cultures are expanded in the absence of anti-CD3⁺ as follows. Those cultures that demonstrate specific lytic activity against peptide and endogenous targets are selected and 5×10⁴ CD8⁺ cells are added to a T25 flask containing the following: 1×10⁶ autologous PBMC per ml which have been peptide-pulsed with 10 μg/ml peptide for 2 hours at 37° C. and irradiated (4,200 rad); 2×10⁵ irradiated (8,000 rad) EBV-transformed cells per ml RPMI-1640 containing 10% (v/v) human AB serum, non-essential AA, sodium pyruvate, 25 mM 2-ME, L-glutamine and gentamicin.

Immunogenicity of A2 Supermotif-Bearing Peptides

[0315] A2-supermotif cross-reactive binding peptides were tested in the cellular assay for the ability to induce peptide-specific CTL in normal individuals. In this analysis, a peptide is considered to be an epitope if it induces peptide-specific CTLs in at least 2 donors (unless otherwise noted) and preferably, also recognizes the endogenously expressed peptide. Examples of immunogenic peptides are shown in Table XXIV.

[0316] Immunogenicity is additionally confirmed using PBMCs isolated from cancer patients. Briefly, PBMCs are isolated from patients with prostate cancer, re-stimulated with peptide-pulsed monocytes and assayed for the ability to recognize peptide-pulsed target cells as well as transfected cells endogenously expressing the antigen.

Evaluation of A*03/A11 Immunogenicity

[0317] HLA-A3 supermotif-bearing cross-reactive binding peptides are also evaluated for immunogenicity using methodology analogous for that used to evaluate the immunogenicity of the HLA-A2 supermotif peptides.

Evaluation of B7 Immunogenicity

[0318] Immunogenicity screening of the B7-supertype cross-reactive binding peptides identified in Example 2 are evaluated in a manner analogous to the evaluation of A2-and A3-supermotif-bearing peptides.

[0319] Peptides bearing other supermotifs and/or motifs, e.g., HLA-A1, HLA-a24 etc. are also evaluated using similar methodology

### Example 4

### Implementation of the Extended Supermotif to Improve the Binding Capacity of Native Epitopes by Creating Analogs

[0320] HLA motifs and supermotifs (comprising primary and/or secondary residues) are useful in the identification and preparation of highly cross-reactive native peptides, as demonstrated herein. Moreover, the definition of HLA motifs and supermotifs also allows one to engineer highly cross-reactive epitopes by identifying residues within a native peptide sequence which can be analoged, or “fixed” to confer upon the peptide certain characteristics, e.g. greater cross-reactivity within the group of HLA molecules that comprise a supertype, and/or greater binding affinity for some or all of those HLA molecules. Examples of analog peptides that exhibit modulated binding affinity are set forth in this example.

Analoging at Primary Anchor Residues

[0321] Peptide engineering strategies were implemented to further increase the cross-reactivity of the epitopes identified above (see, e.g., Table XXII). On the basis of the data disclosed, e.g., in related and co-pending U.S. Ser. No. 09/226,775, the main anchors of A2-supermotif-bearing peptides are altered, for example, to introduce a preferred L, I, V, or M at position 2, and I or V at the C-terminus.

[0322] Peptides that exhibit at least weak A*0201 binding (IC₅₀ of 5000 nM or less), and carrying suboptimal anchor residues at either position 2, the C-terminal position, or both, can be fixed by introducing canonical substitutions (typically L at position 2 and V at the C-terminus). Those analoged peptides that show at least a three-fold increase in A*0201 binding and bind with an IC₅₀ of 500 nM, or preferably 200 nM, or less are then tested for A2 cross-reactive binding along with their wild-type (WT) counterparts. Analoged peptides that bind at least three of the five A2 supertype alleles are then selected for cellular screening analysis.

[0323] Additionally, the selection of analogs for cellular screening analysis is further restricted by the capacity of the WT parent peptide to bind at least weakly, i.e., bind at an IC₅₀ of 5000 nM or less, to three of more A2 supertype alleles. The rationale for this requirement is that the WT peptides must be present endogenously in sufficient quantity to be biologically relevant. Analoged peptides have been shown to have increased immunogenicity and cross-reactivity by T cells specific for the WT epitope (see, e.g., Parkhurst et al., J. Immunol. 157:2539, 1996; and Pogue et al., Proc. Natl. Acad. Sci. USA 92:8166, 1995).

[0324] In the cellular screening of these peptide analogs, it is important to demonstrate that analog-specific CTLs are also able to recognize the wild-type peptide and, when possible, tumor targets that endogenously express the epitope.

[0325] Peptides that were analoged at primary anchor residues, generally by adding a preferred resiude at a primary anchor position, were synthesized and assessed for enhanced binding to A*0201 and/or enhanced cross-reactive binding. Examples of analoged peptides that exhibit increased binding and/or cross-reactivity are shown in Table XXIII.

[0326] Analogs exhibiting altered binding characteristics are then selected for cellular screening studies. Examples are shown in Table XXIV.

[0327] Using methodology similar to that used to develop HLA-A2 analogs, analogs of HLA-A3 and HLA-B7 supermotif-bearing epitopes are also generated. Analogous strategies can be used for peptides bearing other supermotifs/motifs as well. For example, peptides binding at least weakly to 3/5 of the A3-supertype molecules may be engineered at primary anchor residues to possess a preferred residue (V, S, M, or A) at position 2. The analog peptides are then tested for the ability to bind A*03 and A*11 (prototype A3 supertype alleles). Those peptides that demonstrate ≦500 nM binding capacity, often ≦200 nM binding values, are then tested for A3-supertype cross-reactivity. B7 supermotif-bearing peptides may, for example, be engineered to possess a preferred residue (V, I, L, or F) at the C-terminal primary anchor position, as demonstrated by Sidney et al. (J. Immunol. 157:3480-3490, 1996) and tested for binding to B7 supertype alleles.

Analoging at Secondary Anchor Residues

[0328] Moreover, HLA supermotifs are of value in engineering highly cross-reactive peptides and/or peptides that bind HLA molecules with increased affinity by identifying particular residues at secondary anchor positions that are associated with such properties. For example, the binding capacity of a B7 supermotif-bearing peptide representing a discreet single amino acid substitution at position 1 can be analyzed. A peptide can, for example, be analoged to substitute L with F at position I and subsequently be evaluated for increased binding affinity/and or increased cross-reactivity. This procedure will identify analoged peptides with modulated binding affinity.

[0329] Engineered analogs with sufficiently improved binding capacity or cross-reactivity are tested for immunogenicity as above.

Other Analoging Strategies

[0330] Another form of peptide analoging, unrelated to the anchor positions, involves the substitution of a cysteine with α-amino butyric acid. Due to its chemical nature, cysteine has the propensity to form disulfide bridges and sufficiently alter the peptide structurally so as to reduce binding capacity. Subtitution of α-amino butyric acid for cysteine not only alleviates this problem, but has been shown to improve binding and crossbinding capabilities in some instances (see, e.g., the review by Sette et al., In: Persistent Viral Infections, Eds. R. Ahmed and I. Chen, John Wiley & Sons, England, 1999).

[0331] In conclusion, these data demonstrate that by the use of even single amino acid substitutions, it is possible to increase the binding affinity and/or cross-reactivity of peptide ligands for HLA supertype molecules.

### Example 5

### Identification of Peptide Epitope Sequences with HLA-DR Binding Motifs

[0332] Peptide epitopes bearing an HLA class II supermotif or motif may also be identified as outlined below using methodology similar to that described in Examples 1-3.

Selection of HLA-DR-Supermotif-Bearing Epitopes

[0333] To identify HLA class II HTL epitopes, the prostate cancer-associate antigen protein sequences were analyzed for the presence of sequences bearing an HLA-DR-motif or supermotif. Specifically, 15-mer sequences are selected comprising a DR-supermotif, further comprising a 9-mer core, and three-residue N- and C-terminal flanking regions (15 amino acids total).

[0334] Protocols for predicting peptide binding to DR molecules have been developed (Southwood et al., J. Immunol. 160:3363-3373, 1998). These protocols, specific for individual DR molecules, allow the scoring, and ranking, of 9-mer core regions. Each protocol not only scores peptide sequences for the presence of DR-supermotif primary anchors (i.e., at position 1 and position 6) within a 9-mer core, but additionally evaluates sequences for the presence of secondary anchors. Using allele specific selection tables (see, e.g., Southwood et al., ibid.), it has been found that these protocols efficiently select peptide sequences with a high probability of binding a particular DR molecule. Additionally, it has been found that performing these protocols in tandem, specifically those for DR1, DR4w4, and DR7, can efficiently select DR cross-reactive peptides.

[0335] The prostate antigen-derived peptides identified above are tested for their binding capacity to various common HLA-DR molecules. All peptides are initially tested for binding to the DR molecules in the primary panel: DR1, DR4w4, and DR7. Peptides binding at least 2 of these 3 DR molecules with an IC₅₀ value of 1000 nM or less, were then tested for binding to DR5*0101, DRB1*1501, DRB1*1101, DRB1*0802, and DRB1*1302. Peptides were considered to be cross-reactive DR supertype binders if they bound at an IC₅₀ value of 1000 nM or less to at least 5 of the 8 alleles tested.

[0336] Following the strategy outlined above DR supermotif-bearing sequences were identified within the prostate antigen protein sequence. Generally, these sequences are then scored for the combined DR 1-4-7 algorithms. The postive-scoring peptides are synthesized and tested for binding to HLA-DRB1*0101, DRB1*0401, DRB1*0701. Those that bind at least 2 of the 3 alleles are then tested for binding to secondary DR supertype alleles: DRB5*0101, DRB1*1501, DRB1*1101, DRB1*0802, and DRB1*1302.

Selection of DR3 Motif Peptides

[0337] Because HLA-DR3 is an allele that is prevalent in Caucasian, Black, and Hispanic populations, DR3 binding capacity is an important criterion in the selection of HTL epitopes. However, data generated previously indicated that DR3 only rarely cross-reacts with other DR alleles (Sidney et al., J. Immunol. 149:2634-2640, 1992; Geluk et al., J. Immunol. 152:5742-5748, 1994; Southwood et al., J. Immunol. 160:3363-3373, 1998). This is not entirely surprising in that the DR3 peptide-binding motif appears to be distinct from the specificity of most other DR alleles. For maximum efficiency in developing vaccine candidates it would be desirable for DR3 motifs to be clustered in proximity with DR supermotif regions. Thus, peptides shown to be candidates may also be assayed for their DR3 binding capacity. However, in view of the distinct binding specificity of the DR3 motif, peptides binding only to DR3 can also be considered as candidates for inclusion in a vaccine formulation.

[0338] To efficiently identify peptides that bind DR3, the PSA, PSM, PAP, and hK2 protein sequences were analyzed for sequences carrying one of the two DR3 specific binding motifs (Table III) reported by Geluk et al. (J. Immunol. 152:5742-5748, 1994). The corresponding peptides are then synthesized and tested for the ability to bind DR3 with an affinity of 1000 nM or better, i.e., less than 1000 nM.

[0339] Additionally, the DR3 binders are also tested for binding to the DR supertype alleles. Conversely, the DR supertype cross-reactive binding peptides are also tested for DR3 binding capacity.

[0340] DR3 binding epitopes identified in this manner are then included in vaccine compositions with DR supermotif-bearing peptide epitopes.

[0341] Similarly to the case of HLA class I motif-bearing peptides, the class II motif-bearing peptides are analoged to improve affinity or cross-reactivity. For example, aspartic acid at position 4 of the 9-mer core sequence is an optimal residue for DR3 binding, and substitution for that residue often improves DR 3 binding.

[0342] For example, a number of HLA-DR supermotif and DR-3 motif-bearing prostate antigen-associated sequences have been identified. The number in each category is summarized in Table XXV.

### Example 6

### Immunogenicity of HTL Epitopes

[0343] This example determines immunogenic DR supermotif- and DR3 motif-bearing epitopes among those identified using the methodology in Example 5.

[0344] Immunogenicity of HTL epitopes are evaluated in a manner analogous to the determination of immunogenicity of CTL epitopes by assessing the ability to stimulate HTL responses and/or by using appropriate transgenic mouse models. Immunogenicity is determined by screening for: 1.) in vitro primary induction using normal PBMC or 2.) recall responses from cancer patient PBMCs.

### Example 7

### Calculation of Phenotypic Frequencies of HLA-Supertypes in Various Ethnic Backgrounds to Determine Breadth of Population Coverage

[0345] This example illustrates the assessment of the breadth of population coverage of a vaccine composition comprised of multiple epitopes comprising multiple supermotifs and/or motifs.

[0346] In order to analyze population coverage, gene frequencies of HLA alleles were determined. Gene frequencies for each HLA allele were calculated from antigen or allele frequencies utilizing the binomial distribution formulae gf=1−(SQRT(1−af)) (see, e.g., Sidney et al., Human Immunol. 45:79-93, 1996). To obtain overall phenotypic frequencies, cumulative gene frequencies were calculated, and the cumulative antigen frequencies derived by the use of the inverse formula [af=1−(1−Cgf)²].

[0347] Where frequency data was not available at the level of DNA typing, correspondence to the serologically defined antigen frequencies was assumed. To obtain total potential supertype population coverage no linkage disequilibrium was assumed, and only alleles confirmed to belong to each of the supertypes were included (minimal estimates). Estimates of total potential coverage achieved by inter-loci combinations were made by adding to the A coverage the proportion of the non-A covered population that could be expected to be covered by the B alleles considered (e.g., total=A+B*(1−A)). Confirmed members of the A3-like supertype are A3, A11, A31, A*3301, and A*6801. Although the A3-like supertype may also include A34, A66, and A*7401, these alleles were not included in overall frequency calculations. Likewise, confirmed members of the A2-like supertype family are A*0201, A*0202, A*0203, A*0204, A*0205, A*0206, A*0207, A*6802, and A*6901. Finally, the B7-like supertype-confirmed alleles are: B7, B*3501-03, B51, B*5301, B*5401, B*5501-2, B*5601, B*6701, and B*7801 (potentially also B*1401, B*3504-06, B*4201, and B*5602).

[0348] Population coverage achieved by combining the A2-, A3- and B7-supertypes is approximately 86% in five major ethnic groups (see Table XXI). Coverage may be extended by including peptides bearing the A1 and A24 motifs. On average, A1 is present in 12% and A24 in 29% of the population across five different major ethnic groups (Caucasian, North American Black, Chinese, Japanese, and Hispanic). Together, these alleles are represented with an average frequency of 39% in these same ethnic populations. The total coverage across the major ethnicities when A1 and A24 are combined with the coverage of the A2-, A3- and B7-supertype alleles is >95%. An analogous approach can be used to estimate population coverage achieved with combinations of class II motif-bearing epitopes.

### Example 8

### Recognition of Generation of Endogenous Processed Antigens after Priming

[0349] This example determines that CTL induced by native or analogued peptide epitopes identified and selected as described in Examples 1-6 recognize endogenously synthesized, i.e., native antigens, using a transgenic mouse model.

[0350] Effector cells isolated from transgenic mice that are immunized with peptide epitopes (as described, e.g., in Wentworth et al., Mol. Immunol. 32:603, 1995), for example HLA-A2 supermotif-bearing epitopes, are re-stimulated in vitro using peptide-coated stimulator cells. Six days later, effector cells are assayed for cytotoxicity and the cell lines that contain peptide-specific cytotoxic activity are further re-stimulated. An additional six days later, these cell lines are tested for cytotoxic activity on ⁵¹Cr labeled Jurkat-A2.1/K^{b} target cells in the absence or presence of peptide, and also tested on ⁵¹Cr labeled target cells bearing the endogenously synthesized antigen, i.e. prostate tumor cells or cells that are stably transfected with TAA expression vectors.

[0351] The result will demonstrate that CTL lines obtained from animals primed with peptide epitope recognize endogenously synthesized antigen. The choice of transgenic mouse model to be used for such an analysis depends upon the epitope(s) that is being evaluated. In addition to HLA-A*0201/K^{b} transgenic mice, several other transgenic mouse models including mice with human A11, which may also be used to evaluate A3 epitopes, and B7 alleles have been characterized and others (e.g., transgenic mice for HLA-A1 and A24) are being developed. HLA-DR1 and HLA-DR3 mouse models have also been developed, which may be used to evaluate HTL epitopes.

### Example 9

### Activity of CTL-HTL Conjugated Epitopes in Transgenic Mice

[0352] This example illustrates the induction of CTLs and HTLs in transgenic mice by use of a tumor associated antigen CTL/HTL peptide conjugate whereby the vaccine composition comprises peptides to be administered to a cancer patient. The peptide composition can comprise multiple CTL and/or HTL epitopes and further, can comprise epitopes selected from multiple-tumor associated antigens. The epitopes are identified using methodology as described in Examples 1-6 This analysis demonstrates the enhanced immunogenicity that can be achieved by inclusion of one or more HTL epitopes in a vaccine composition. Such a peptide composition can comprise an HTL epitope conjugated to a preferred CTL epitope containing, for example, at least one CTL epitope selected from Table XXIII, or other analogs of that epitope. The peptides may be lipidated, if desired.

[0353] Immunization procedures: Immunization of transgenic mice is performed as described (Alexander et al., J. Immunol. 159:4753-4761, 1997). For example, A2/K^{b} mice, which are transgenic for the human HLA A2.1 allele and are useful for the assessment of the immunogenicity of HLA-A*0201 motif- or HLA-A2 supermotif-bearing epitopes, are primed subcutaneously (base of the tail) with a 0.1 ml of peptide in Incomplete Freund's Adjuvant, or if the peptide composition is a lipidated CTL/HTL conjugate, in DMSO/saline or if the peptide composition is a polypeptide, in PBS or Incomplete Freund's Adjuvant. Seven days after priming, splenocytes obtained from these animals are restimulated with syngenic irradiated LPS-activated lymphoblasts coated with peptide.

[0354] The target cells for peptide-specific cytotoxicity assays are Jurkat cells transfected with the HLA-A2.1/K^{b} chimeric gene (e.g., Vitiello et al., J. Exp. Med. 173:1007, 1991).

[0355] In vitro CTL activation: One week after priming, spleen cells (30×10⁶ cells/flask) are co-cultured at 37° C. with syngeneic, irradiated (3000 rads), peptide coated lymphoblasts (10×10⁶ cells/flask) in 10 ml of culture medium/T25 flask. After six days, effector cells are harvested and assayed for cytotoxic activity.

[0356] Assay for cytotoxic activity: Target cells (1.0 to 1.5×10⁶) are incubated at 37° C. in the presence of 200 μl of ⁵¹Cr. After 60 minutes, cells are washed three times and resuspended in medium. Peptide is added where required at a concentration of 1 μg/ml. For the assay, 10^{4 51}Cr-labeled target cells are added to different concentrations of effector cells (final volume of 200 μl) in U-bottom 96-well plates. After a 6 hour incubation period at 37° C., a 0.1 ml aliquot of supernatant is removed from each well and radioactivity is determined in a Micromedic automatic gamma counter. The percent specific lysis is determined by the formula: percent specific release=100×(experimental release−spontaneous release)/(maximum release−spontaneous release). To facilitate comparison between separate CTL assays run under the same conditions, % ⁵¹Cr release data is expressed as lytic units/10⁶ cells. One lytic unit is arbitrarily defined as the number of effector cells required to achieve 30% lysis of 10,000 target cells in a 6 hour ⁵¹Cr release assay. To obtain specific lytic units/10⁶, the lytic units/10⁶ obtained in the absence of peptide is subtracted from the lytic units/10⁶ obtained in the presence of peptide. For example, if 30% ⁵¹Cr release is obtained at the effector (E): target (T) ratio of 50:1 (i.e., 5×10⁵ effector cells for 10,000 targets) in the absence of peptide and 5:1 (i.e., 5×10⁴ effector cells for 10,000 targets) in the presence of peptide, the specific lytic units would be: [(1/50,000)−(1/500,000)]×10⁶=18 LU.

[0357] The results are analyzed to assess the magnitude of the CTL responses of animals injected with the immunogenic CTL/HTL conjugate vaccine preparation. The magnitude and frequency of the response can also be compared to the the CTL response achieved using the CTL epitopes by themselves. Analyses similar to this may be performed to evaluate the immunogenicity of peptide conjugates containing multiple CTL epitopes and/or multiple HTL epitopes. In accordance with these procedures it is found that a CTL response is induced, and concomitantly that an HTL response is induced upon administration of such compositions.

### Example 10

### Selection of CTL and HTL Epitopes for Inclusion in a Cancer Vaccine

[0358] This example illustrates the procedure for the selection of peptide epitopes for vaccine compositions of the invention. The peptides in the composition can be in the form of a nucleic acid sequence, either single or one or more sequences (i.e., minigene) that encodes peptide(s), or may be single and/or polyepitopic peptides.

[0359] The following principles are utilized when selecting an array of epitopes for inclusion in a vaccine composition. Each of the following principles is balanced in order to make the selection.

[0360] Epitopes are selected which, upon administration, mimic immune responses that have been observed to be correlated with tumor clearance. For example, a vaccine can include 3-4 epitopes that come from at least one prostate cancer-associated antigen. Epitopes from one prostate cancer-associated antigen can be used in combination with epitopes from one or more additional TAAs to produce a vaccine that targets tumors with varying expression patterns of frequently-expressed TAAs as described, e.g., in Example 15.

[0361] Epitopes are preferably selected that have a binding affinity (IC₅₀) of 500 nM or less, often 200 nM or less, for an HLA class I molecule, or for a class II molecule, 1000 nM or less.

[0362] Sufficient supermotif bearing peptides, or a sufficient array of allele-specific motif bearing peptides, are selected to give broad population coverage. For example, epitopes are selected to provide at least 80% population coverage. A Monte Carlo analysis, a statistical evaluation known in the art, can be employed to assess breadth, or redundancy, of population coverage.

[0363] When selecting epitopes from cancer-related antigens it is often preferred to select analogs because the patient may have developed tolerance to the native epitope.

[0364] When creating a polyepitopic composition, e.g. a minigene, it is typically desirable to generate the smallest peptide possible that encompasses the epitopes of interest, although spacers or other flanking sequences can also be incorporated. The principles employed are often similar as those employed when selecting a peptide comprising nested epitopes. Additionally, however, upon determination of the nucleic acid sequence to be provided as a minigene, the peptide sequence encoded thereby is analyzed to determine whether any “junctional epitopes” have been created. A junctional epitope is a potential HLA binding epitope, as predicted, e.g., by motif analysis. Junctional epitopes are generally to be avoided because the recipient may bind to an HLA molecule and generate an immune response to that epitope, which is not present in a native protein sequence.

[0365] A vaccine composition comprised of selected peptides, when administered, is safe, efficacious, and elicits an immune response that results in tumor cell killing and reduction of tumor size or mass.

### Example 11

### Construction of Minigene Multi-Epitope DNA Plasmids

[0366] This example provides general guidance for the construction of a minigene expression plasmid. Minigene plasmids may, of course, contain various configurations of CTL and/or HTL epitopes or epitope analogs as described herein. Examples of the construction and evaluation of expression plasmids are described, for example, in co-pending U.S. Ser. No. 09/311,784 filed May 13, 1999.

[0367] A minigene expression plasmid may include multiple CTL and HTL peptide epitopes. In this example, HLA-A2, -A3, -B7 supermotif-bearing peptide epitopes and HLA-A1 and -A24 motif-bearing peptide epitopes are used in conjunction with DR supermotif-bearing epitopes and/or DR3 epitopes. HLA class I supermotif or motif-bearing peptide epitopes derived from multiple prostate cancer-associated antigens are selected such that multiple supermotifs/motifs are represented to ensure broad population coverage. Similarly, HLA class II epitopes are selected from multiple prostate cancer-associated antigens to provide broad population coverage, i.e. both HLA DR-1-4-7 supermotif-bearing epitopes and HLA DR-3 motif-bearing epitopes are selected for inclusion in the minigene construct. The selected CTL and HTL epitopes are then incorporated into a minigene for expression in an expression vector.

[0368] This example illustrates the methods to be used for construction of such a minigene-bearing expression plasmid. Other expression vectors that may be used for minigene compositions are available and known to those of skill in the art.

[0369] The minigene DNA plasmid contains a consensus Kozak sequence and a consensus murine kappa Ig-light chain signal sequence followed by CTL and/or HTL epitopes selected in accordance with principles disclosed herein. The sequence encodes an open reading frame fused to the Myc and His antibody epitope tag coded for by the pcDNA 3.1 Myc-His vector.

[0370] Overlapping oligonucleotides that can, for example, average about 70 nucleotides in length with 15 nucleotide overlaps, are synthesized and HPLC-purified. The oligonucleotides encode the selected peptide epitopes as well as appropriate linker nucleotides, Kozak sequence, and signal sequence. The final multiepitope minigene is assembled by extending the overlapping oligonucleotides in three sets of reactions using PCR. A Perkin/Elmer 9600 PCR machine is used and a total of 30 cycles are performed using the following conditions: 95° C. for 15 sec, annealing temperature (5° below the lowest calculated Tm of each primer pair) for 30 sec, and 72° C. for 1 min.

[0371] For example, a minigene can be prepared as follows. For a first PCR reaction, 5 μg of each of two oligonucleotides are annealed and extended: In an example using eight oligonucleotides, i.e., four pairs of primers, oligonucleotides 1+2, 3+4, 5+6, and 7+8 are combined in 100 μl reactions containing Pfu polymerase buffer (1×=10 mM KCL, 10 mM (NH₄)₂SO₄, 20 mM Tris-chloride, pH 8.75, 2 mM MgSO₄, 0.1% Triton X-100, 100 μg/ml BSA), 0.25 mM each dNTP, and 2.5 U of Pfu polymerase. The full-length dimer products are gel-purified, and two reactions containing the product of 1+2 and 3+4, and the product of 5+6 and 7+8 are mixed, annealed, and extended for 10 cycles. Half of the two reactions are then mixed, and 5 cycles of annealing and extension carried out before flanking primers are added to amplify the full length product. The full-length product is gel-purified and cloned into pCR-blunt (Invitrogen) and individual clones are screened by sequencing.

### Example 12

### The Plasmid Construct and the Degree to which it Induces Immunogenicity

[0372] The degree to which a plasmid construct, for example a plasmid constructed in accordance with Example 11, is able to induce immunogenicity can be evaluated in vitro by testing for epitope presentation by APC following transduction or transfection of the APC with an epitope-expressing nucleic acid construct. Such a study determines “antigenicity” and allows the use of human APC. The assay determines the ability of the epitope to be presented by the APC in a context that is recognized by a T cell by quantifying the density of epitope-HLA class I complexes on the cell surface. Quantitation can be performed by directly measuring the amount of peptide eluted from the APC (see, e.g., Sijts et al., J. Immunol. 156:683-692, 1996; Demotz et al., Nature 342:682-684, 1989); or the number of peptide-HLA class I complexes can be estimated by measuring the amount of lysis or lymphokine release induced by infected or transfected target cells, and then determining the concentration of peptide necessary to obtained equivalent levels of lysis or lymphokine release (see, e.g., Kageyama et al., J. Immunol. 154:567-576, 1995).

[0373] Atlernatively, immunogenicity can be evaluated through in vivo injections into mice and subsequent in vitro assessment of CTL and HTL activity, which are analysed using cytotoxicity and proliferation assays, respectively, as detailed e.g., in co-pending U.S. Ser. No. 09/311,784 filed May 13, 1999 and Alexander et al., Immunity 1:751-761, 1994.

[0374] For example, to assess the capacity of a DNA minigene construct (e.g., a pMin minigene construct generated as decribed in U.S. Ser. No. 09/311,784) containing at least one HLA-A2 supermotif peptide to induce CTLs in vivo, HLA-A2.1/K^{b} transgenic mice, for example, are immunized intramuscularly with 100 μg of naked cDNA. As a means of comparing the level of CTLs induced by cDNA immunization, a control group of animals is also immunized with an actual peptide composition that comprises multiple epitopes synthesized as a single polypeptide as they would be encoded by the minigene.

[0375] Splenocytes from immunized animals are stimulated twice with each of the respective compositions (peptide epitopes encoded in the minigene or the polyepitopic peptide), then assayed for peptide-specific cytotoxic activity in a ⁵¹Cr release assay. The results indicate the magnitude of the CTL response directed against the A2-restricted epitope, thus indicating the in vivo immunogenicity of the minigene vaccine and polyepitopic vaccine. It is, therefore, found that the minigene elicits immune responses directed toward the HLA-A2 supermotif peptide epitopes as does the polyepitopic peptide vaccine. A similar analysis is also performed using other HLA-A3 and HLA-B7 transgenic mouse models to assess CTL induction by HLA-A3 and HLA-B7 motif or supermotif epitopes.

[0376] To assess the capacity of a class II epitope encoding minigene to induce HTLs in vivo, DR transgenic mice, or for those epitope that cross react with the appropriate mouse MHC molecule, I-A^{b}-restricted mice, for example, are immunized intramuscularly with 100 μg of plasmid DNA. As a means of comparing the level of HTLs induced by DNA immunization, a group of control animals is also immunized with an actual peptide composition emulsified in complete Freund's adjuvant. CD4+ T cells, i.e. HTLs, are purified from splenocytes of immunized animals and stimulated with each of the respective compositions (peptides encoded in the minigene). The HTL response is measured using a ³H-thymidine incorporation proliferation assay, (see, e.g., Alexander et al. Immunity 1:751-761, 1994). The results indicate the magnitude of the HTL response, thus demonstrating the in vivo immunogenicity of the minigene.

[0377] DNA minigenes, constructed as described in Example 11, may also be evaluated as a vaccine in combination with a boosting agent using a prime boost protocol. The boosting agent can consist of recombinant protein (e.g., Barnett et al., Aids Res. and Human Retroviruses 14, Supplement 3:S299-S309, 1998) or recombinant vaccinia, for example, expressing a minigene or DNA encoding the complete protein of interest (see, e.g., Hanke et al., Vaccine 16:439-445, 1998; Sedegah et al., Proc. Natl. Acad. Sci USA 95:7648-53, 1998; Hanke and McMichael, Immunol. Letters 66:177-181, 1999; and Robinson et al., Nature Med. 5:526-34, 1999).

[0378] For example, the efficacy of the DNA minigene used in a prime boost protocol is initially evaluated in transgenic mice. In this example, A2.1/K^{b} transgenic mice are immunized IM with 100 μg of a DNA minigene encoding the immunogenic peptides including at least one HLA-A2 supermotif-bearing peptide. After an incubation period (ranging from 3-9 weeks), the mice are boosted IP with 10⁷ pfu/mouse of a recombinant vaccinia virus expressing the same sequence encoded by the DNA minigene. Control mice are immunized with 100 μg of DNA or recombinant vaccinia without the minigene sequence, or with DNA encoding the minigene, but without the vaccinia boost. After an additional incubation period of two weeks, splenocytes from the mice are immediately assayed for peptide-specific activity in an ELISPOT assay. Additionally, splenocytes are stimulated in vitro with the A2-restricted peptide epitopes encoded in the minigene and recombinant vaccinia, then assayed for peptide-specific activity in an IFN-γ ELISA.

[0379] It is found that the minigene utilized in a prime-boost protocol elicits greater immune responses toward the HLA-A2 supermotif peptides than with DNA alone. Such an analysis can also be performed using HLA-A11 or HLA-B7 transgenic mouse models to assess CTL induction by HLA-A3 or HLA-B7 motif or supermotif epitopes.

[0380] The use of prime boost protocols in humans is described in Example 20.

### Example 13

### Peptide Composition for Prophylactic Uses

[0381] Vaccine compositions of the present invention are used to prevent cancer in persons who are at high risk for developing a tumor. For example, a polyepitopic peptide epitope composition (or a nucleic acid comprising the same) containing multiple CTL and HTL epitopes such as those selected in Examples 9 and/or 10, which are also selected to target greater than 80% of the population, is administered to an individual at high risk for prostate cancer. The composition is provided as a single polypeptide that encompasses multiple epitopes. The vaccine is administered in an aqueous carrier comprised of Freunds Incomplete Adjuvant. The dose of peptide for the initial immunization is from about 1 to about 50,000 μg, generally 100-5,000 μg, for a 70 kg patient. The initial administration of vaccine is followed by booster dosages at 4 weeks followed by evaluation of the magnitude of the immune response in the patient, by techniques that determine the presence of epitope-specific CTL populations in a PBMC sample. Additional booster doses are administered as required. The composition is found to be both safe and efficacious as a prophylaxis against cancer.

[0382] Alternatively, the polyepitopic peptide composition can be administered as a nucleic acid in accordance with methodologies known in the art and disclosed herein.

### Example 14

### Polyepitopic Vaccine Compositions Derived from Native TAA Sequences

[0383] A native TAA polyprotein sequence is screened, preferably using computer algorithms defined for each class I and/or class II supermotif or motif, to identify “relatively short” regions of the polyprotein that comprise multiple epitopes and is preferably less in length than an entire native antigen. This relatively short sequence that contains multiple distinct, even overlapping, epitopes is selected and used to generate a minigene construct. The construct is engineered to express the peptide, which corresponds to the native protein sequence. The “relatively short” peptide is generally less than 1000, 500, or 250 amino acids in length, often less than 100 amino acids in length, preferably less than 75 amino acids in length, and more preferably less than 50 amino acids in length. The protein sequence of the vaccine composition is selected because it has maximal number of epitopes contained within the sequence, i.e., it has a high concentration of epitopes. As noted herein, epitope motifs may be nested or overlapping (i.e., frame shifted relative to one another). For example, with frame shifted overlapping epitopes, two 9-mer epitopes and one 10-mer epitope can be present in a 10 amino acid peptide. Such a vaccine composition is administered for therapeutic or prophylactic purposes.

[0384] The vaccine composition will preferably include, for example, three CTL epitopes and at least one HTL epitope from multiple prostate cancer-associated antigens. This polyepitopic native sequence is administered either as a peptide or as a nucleic acid sequence which encodes the peptide. Alternatively, an analog can be made of this native sequence, whereby one or more of the epitopes comprise substitutions that alter the cross-reactivity and/or binding affinity properties of the polyepitopic peptide.

[0385] The embodiment of this example provides for the possibility that an as yet undiscovered aspect of immune system processing will apply to the native nested sequence and thereby facilitate the production of therapeutic or prophylactic immune response-inducing vaccine compositions. Additionally such an embodiment provides for the possibility of motif-bearing epitopes for an HLA makeup that is presently unknown. Furthermore, this embodiment (absent analogs) directs the immune response to multiple peptide sequences that are actually present in native TAAs thus avoiding the need to evaluate any junctional epitopes. Lastly, the embodiment provides an economy of scale when producing nucleic acid vaccine compositions.

[0386] Related to this embodiment, computer programs can be derived in accordance with principles in the art, which identify in a target sequence, the greatest number of epitopes per sequence length.

### Example 15

### Polyepitopic Vaccine Compositions Comprising Epitopes From Multiple Tumor-Associated Antigens

[0387] The prostate cancer-associated antigen peptide epitopes of the present invention are used in combination with each other, or with peptide epitopes from other target tumor-associated antigens to create a vaccine composition that is useful for the treatment of prostate tumors from multiple patients. Furthermore, a vaccine composition comprising epitopes from multiple tumor antigens also reduces the potential for escape mutants due to loss of expression of an individual tumor antigen.

[0388] The composition can be provided as a single polypeptide that incorporates the multiple epitopes from the various TAAs, or can be administered as a composition comprising one or more discrete epitopes. Alternatively, the vaccine can be administered as a minigene construct or as dendritic cells which have been loaded with the peptide epitopes in vitro.

### Example 16

### Use of Peptides to Evaluate an Immune Response

[0389] Peptides of the invention may be used to analyze an immune response for the presence of specific CTL or HTL populations directed to a prostate cancer-associated antigen. Such an analysis may be performed using multimeric complexes as described, e.g., by Ogg et al., Science 279:2103-2106, 1998 and Greten et al., Proc. Natl. Acad. Sci. USA 95:7568-7573, 1998. In the following example, peptides in accordance with the invention are used as a reagent for diagnostic or prognostic purposes, not as an immunogen.

[0390] In this example, highly sensitive human leukocyte antigen tetrameric complexes (“tetramers”) are used for a cross-sectional analysis of, for example, tumor-associated antigen HLA-A*0201-specific CTL frequencies from HLA A*0201-positive individuals at different stages of disease or following immunization using a TAA peptide containing an A*0201 motif. Tetrameric complexes are synthesized as described (Musey et al., N. Engl. J. Med. 337:1267, 1997). Briefly, purified HLA heavy chain (A*0201 in this example) and β2-microglobulin are synthesized by means of a prokaryotic expression system. The heavy chain is modified by deletion of the transmembrane-cytosolic tail and COOH-terminal addition of a sequence containing a BirA enzymatic biotinylation site. The heavy chain, β2-microglobulin, and peptide are refolded by dilution. The 45-kD refolded product is isolated by fast protein liquid chromatography and then biotinylated by BirA in the presence of biotin (Sigma, St. Louis, Mo.), adenosine 5′triphosphate and magnesium. Streptavidin-phycoerythrin conjugate is added in a 1:4 molar ratio, and the tetrameric product is concentrated to 1 mg/ml. The resulting product is referred to as tetramer-phycoerythrin.

[0391] For the analysis of patient blood samples, approximately one million PBMCs are centrifuged at 300 g for 5 minutes and resuspended in 50 μl of cold phosphate-buffered saline. Tri-color analysis is performed with the tetramer-phycoerythrin, along with anti-CD8-Tricolor, and anti-CD38. The PBMCs are incubated with tetramer and antibodies on ice for 30 to 60 min and then washed twice before formaldehyde fixation. Gates are applied to contain >99.98% of control samples. Controls for the tetramers include both A*0201-negative individuals and A*0201-positive uninfected donors. The percentage of cells stained with the tetramer is then determined by flow cytometry. The results indicate the number of cells in the PBMC sample that contain epitope-restricted CTLs, thereby readily indicating the extent of immune response to the TAA epitope, and thus the stage of tumor progression or exposure to a vaccine that elicits a protective or therapeutic response.

### Example 17

### Use of Peptide Epitopes to Evaluate Recall Responses

[0392] The peptide epitopes of the invention are used as reagents to evaluate T cell responses, such as acute or recall responses, in patients. Such an analysis may be performed on patients who are in remission, have a tumor, or who have been vaccinated with a prostate cancer-associated antigen vaccine.

[0393] For example, the class I restricted CTL response of persons who have been vaccinated may be analyzed. The vaccine may be any TAA vaccine. PBMC are collected from vaccinated individuals and HLA typed. Appropriate peptide epitopes of the invention that, optimally, bear supermotifs to provide cross-reactivity with multiple HLA supertype family members, are then used for analysis of samples derived from individuals who bear that HLA type.

[0394] PBMC from vaccinated individuals are separated on Ficoll-Histopaque density gradients (Sigma Chemical Co., St. Louis, Mo.), washed three times in HBSS (GIBCO Laboratories), resuspended in RPMI-1640 (GIBCO Laboratories) supplemented with L-glutamine (2 mM), penicillin (50 U/ml), streptomycin (50 μg/ml), and Hepes (10 mM) containing 10% heat-inactivated human AB serum (complete RPMI) and plated using microculture formats. A synthetic peptide comprising an epitope of the invention is added at 10 μg/ml to each well and HBV core 128-140 epitope is added at 1 μg/ml to each well as a source of T cell help during the first week of stimulation.

[0395] In the microculture format, 4×10⁵ PBMC are stimulated with peptide in 8 replicate cultures in 96-well round bottom plate in 100 μl/well of complete RPMI. On days 3 and 10, 100 μl of complete RPMI and 20 U/ml final concentration of rIL-2 are added to each well. On day 7 the cultures are transferred into a 96-well flat-bottom plate and restimulated with peptide, rIL-2 and 10⁵ irradiated (3,000 rad) autologous feeder cells. The cultures are tested for cytotoxic activity on day 14. A positive CTL response requires two or more of the eight replicate cultures to display greater than 10% specific ⁵¹Cr release, based on comparison with uninfected control subjects as previously described (Rehermann, et al., Nature Med. 2:1104, 1108, 1996; Rehermann et al., J. Clin. Invest. 97:1655-1665, 1996; and Rehermann et al. J. Clin. Invest. 98:1432-1440, 1996).

[0396] Target cell lines are autologous and allogeneic EBV-transformed B-LCL that are either purchased from the American Society for Histocompatibility and Immunogenetics (ASHI, Boston, Mass.) or established from the pool of patients as described (Guilhot, et al. J. Virol. 66:2670-2678, 1992).

[0397] Cytotoxicity assays are performed in the following manner. Target cells consist of either allogeneic HLA-matched or autologous EBV-transformed B lymphoblastoid cell line that are incubated overnight with the synthetic peptide epitope of the invention at 10 μM, and labeled with 100 μCi of ⁵¹Cr (Amersham Corp., Arlington Heights, Ill.) for 1 hour after which they are washed four times with HBSS.

[0398] Cytolytic activity is determined in a standard 4 hour, split-well ⁵¹Cr release assay using U-bottomed 96 well plates containing 3,000 targets/well. Stimulated PBMC are tested at effector/target (E/T) ratios of 20-50:1 on day 14. Percent cytotoxicity is determined from the formula: 100×[(experimental release-spontaneous release)/maximum release-spontaneous release)]. Maximum release is determined by lysis of targets by detergent (2% Triton X-100; Sigma Chemical Co., St. Louis, Mo.). Spontaneous release is <25% of maximum release for all experiments.

[0399] The results of such an analysis indicate the extent to which HLA-restricted CTL populations have been stimulated by previous exposure to the TAA or TAA vaccine.

[0400] The class II restricted HTL responses may also be analyzed. Purified PBMC are cultured in a 96-well flat bottom plate at a density of 1.5×10⁵ cells/well and are stimulated with 10 μg/ml synthetic peptide, whole antigen, or PHA. Cells are routinely plated in replicates of 4-6 wells for each condition. After seven days of culture, the medium is removed and replaced with fresh medium containing 10 U/ml IL-2. Two days later, 1 μCi ³H-thymidine is added to each well and incubation is continued for an additional 18 hours. Cellular DNA is then harvested on glass fiber mats and analyzed for ³H-thymidine incorporation. Antigen-specific T cell proliferation is calculated as the ratio of ³H-thymidine incorporation in the presence of antigen divided by the ³H-thymidine incorporation in the absence of antigen.

### Example 18

### Induction of Specific CTL Response in Humans

[0401] A human clinical trial for an immunogenic composition comprising CTL and HTL epitopes of the invention is set up as an IND Phase I, dose escalation study. Such a trial is designed, for example, as follows:

[0402] A total of about 27 male subjects are enrolled and divided into 3 groups:

[0403] Group I: 3 subjects are injected with placebo and 6 subjects are injected with 5 μg of peptide composition;

[0404] Group II: 3 subjects are injected with placebo and 6 subjects are injected with 50 μg peptide composition;

[0405] Group III: 3 subjects are injected with placebo and 6 subjects are injected with 500 μg of peptide composition.

[0406] After 4 weeks following the first injection, all subjects receive a booster inoculation at the same dosage. Additional booster inoculations can be administered on the same schedule.

[0407] The endpoints measured in this study relate to the safety and tolerability of the peptide composition as well as its immunogenicity. Cellular immune responses to the peptide composition are an index of the intrinsic activity of the peptide composition, and can therefore be viewed as a measure of biological efficacy. The following summarize the clinical and laboratory data that relate to safety and efficacy endpoints.

[0408] Safety: The incidence of adverse events is monitored in the placebo and drug treatment group and assessed in terms of degree and reversibility.

[0409] Evaluation of Vaccine Efficacy: For evaluation of vaccine efficacy, subjects are bled before and after injection. Peripheral blood mononuclear cells are isolated from fresh heparinized blood by Ficoll-Hypaque density gradient centrifugation, aliquoted in freezing media and stored frozen. Samples are assayed for CTL and HTL activity.

[0410] The vaccine is found to be both safe and efficacious.

### Example 19

### Therapeutic Use in Cancer Patients

[0411] Evaluation of vaccine compositions are performed to validate the efficacy of the CTL-HTL peptide compositions in cancer patients. The main objectives of the trials are to determine an effective dose and regimen for inducing CTLs in prostate cancer patients, to establish the safety of inducing a CTL and HTL response in these patients, and to see to what extent activation of CTLs improves the clinical picture of cancer patients, as manifested by a reduction in tumor cell numbers. Such a study is designed, for example, as follows:

[0412] The studies are performed in multiple centers. The trial design is an open-label, uncontrolled, dose escalation protocol wherein the peptide composition is administered as a single dose followed six weeks later by a single booster shot of the same dose. The dosages are 50, 500 and 5,000 micrograms per injection. Drug-associated adverse effects (severity and reversibility) are recorded.

[0413] There are three patient groupings. The first group is injected with 50 micrograms of the peptide composition and the second and third groups with 500 and 5,000 micrograms of peptide composition, respectively. The patients within each group are males, typically above the age of 50, and represent diverse ethnic backgrounds.

### Example 20

### Induction of CTL Responses Using a Prime Boost Protocol

[0414] A prime boost protocol similar in its underlying principle to that used to evaluate the efficacy of a DNA vaccine in transgenic mice, such as described in Example 12, can also be used for the administration of the vaccine to humans. Such a vaccine regimen can include an initial administration of, for example, naked DNA followed by a boost using recombinant virus encoding the vaccine, or recombinant protein/polypeptide or a peptide mixture administered in an adjuvant.

[0415] For example, the initial immunization can be performed using an expression vector, such as one constructed in accordance with Example 11, in the form of naked nucleic acid administered IM (or SC or ID) in the amounts of 0.5-5 mg at multiple sites. The nucleic acid (0.1 to 1000 μg) can also be administered using a gene gun. Following an incubation period of 3-4 weeks, a booster dose is then administered. The booster can be recombinant fowlpox virus administered at a dose of 5- to 5×10⁹ pfu. An alternative recombinant virus, such as an MVA, canarypox, adenovirus, or adeno-associated virus, can also be used for the booster, or the polyepitopic protein or a mixture of the peptides can be administered. For evaluation of vaccine efficacy, patient blood samples will be obtained before immunization as well as at intervals following administration of the initial vaccine and booster doses of the vaccine. Peripheral blood mononuclear cells are isolated from fresh heparinized blood by Ficoll-Hypaque density gradient centrifugation, aliquoted in freezing media and stored frozen. Samples are assayed for CTL and HTL activity.

[0416] Analysis of the results will indicate that a magnitude of response sufficient to achieve protective immunity against prostate cancer is generated.

### Example 21

### Administration of Vaccine Compositions Using Antigen Presenting Cells

[0417] Vaccines comprising peptide epitopes of the invention may be administered using antigen-presenting cells (APCs), or “professional” APCs such as dendritic cells (DC). In this example, the peptide-pulsed DC are administered to a patient to stimulate a CTL response in vivo. In this method, dendritic cells are isolated, expanded, and pulsed with a vaccine comprising peptide CTL and HTL epitopes of the invention. The dendritic cells are infused back into the patient to elicit CTL and HTL responses in vivo. The induced CTL and HTL then destroy (CTL) or facilitate destruction (HTL) of the specific target tumor cells that bear the proteins from which the epitopes in the vaccine are derived.

[0418] For example, a cocktail of epitope-bearing peptides is administered ex vivo to PBMC, or isolated DC therefrom, from the patient's blood. A pharmaceutical to facilitate harvesting of DC can be used, such as Progenipoietin™ (Monsanto, St. Louis, Mo.) or GM-CSF/IL-4. After pulsing the DC with peptides and prior to reinfusion into patients, the DC are washed to remove unbound peptides.

[0419] As appreciated clinically, and readily determined by one of skill based on clinical outcomes, the number of dendritic cells reinfused into the patient can vary (see, e.g., Nature Med. 4:328, 1998; Nature Med. 2:52, 1996 and Prostate 32:272, 1997). Although 2-50×10⁶ dendritic cells per patient are typically administered, larger number of dendritic cells, such as 10⁷ or 10⁸ can also be provided. Such cell populations typically contain between 50-90% dendritic cells.

[0420] In some embodiments, peptide-loaded PBMC are injected into patients without purification of the DC. For example, PBMC containing DC generated after treatment with an agent such as Progenipoietin™ are injected into patients without purification of the DC. The total number of PBMC that are administered often ranges from 10⁸ to 10¹⁰. Generally, the cell doses injected into patients is based on the percentage of DC in the blood of each patient, as determined, for example, by immunofluorescence analysis with specific anti-DC antibodies. Thus, for example, if Progenipoietin™ mobilizes 2% DC in the peripheral blood of a given patient, and that patient is to receive 5×10⁶ DC, then the patient will be injected with a total of 2.5×10⁸ peptide-loaded PBMC. The percent DC mobilized by an agent such as Progenipoietin™ is typically estimated to be between 2-10%, but can vary as appreciated by one of skill in the art.

[0421] The ability of DC to stimulate immune responses was evaluated in both in vitro and in vivo immune function assays. These assays include the stimulation of CTL hybridomas and CTL cell lines, and the in vivo activation of CTL.

DC Purification

[0422] Progenipoietin™-mobilized DC were purified from peripheral blood (PB) and spleens of Progenipoietin™-treated C57B1/6 mice to evaluate their ability to present antigen and to elicit cellular immune responses. Briefly, DC were purified from total WBC and spleen using a positive selection strategy employing magnetic beads coated with a CD11c specific antibody (Miltenyi Biotec, Auburn Calif.). For comparison, ex vivo expanded DC were generated by culturing bone marrow cells from untreated C57B1/6 mice with the standard cocktail of GM-CSF and IL-4 (R&D Systems, Minneapolis, Minn.) for a period of 7-8 days (Mayordomo et al., Nature Med. 1: 1297-1302 (1995)). Recent studies have revealed that this ex vivo expanded DC population contains effective antigen presenting cells, with the capacity to stimulate anti-tumor immune responses (Celluzzi et al., J. Exp. Med. 83:283-287 (1996)).

[0423] The purities of Progenipoietin™-derived DC (100 μg/day, 10 days, SC) and GM-CSF/IL-4 ex vivo expanded DC were determined by flow cytometry. DC populations were defined as cells expressing both CD11c and MHC Class II molecules. Following purification of DC from magnetic CD11c microbeads, the percentage of double positive PB-derived DC, isolated from Progenipoietin™-treated mice, was enriched from approximately 4% to a range from 48-57% (average yield=4.5×10⁶ DC/animal). The percentage of purified splenic DC isolated from Progenipoietin™ treated mice was enriched from a range of 12-17% to a range of 67-77%. The purity of GM-CSF/IL-4 ex vivo expanded DC ranged from 31-41% (Wong et al., J. Immunother., 21:32040 (1998)).

In Vitro Stimulation of CTL Hybridomas and CTL Cell Lines: Presentation of Specific CTL Epitopes

[0424] The ability of Progenipoietin™ generated DC to stimulate a CTL cell line was demonstrated in vitro using a viral-derived epitope and a corresponding epitope responsive CTL cell line. Transgenic mice expressing human HLA-A2.1 were treated with Progenipoietin™. Splenic DC isolated from these mice were pulsed with a peptide epitope derived from hepatitis B virus (HBV Pol 455) and then incubated with a CTL cell line that responds to the HBV Pol 455 epitope/HLA-A2.1 complex by producing IFNγ. The capacity of Progenipoietin™-derived splenic DC to present the HBV Pol 455 epitope was greater than that of two positive control populations: GM-CSF and IL-4 expanded DC cultures, or purified splenic B cells. A left shift in the response curve for Progenipoietin™-derived spleen cells versus the other antigen presenting cells revealed that these Progenipoietin™-derived cells required less epitope to stimulate maximal IFNγ release by the responder cell line.

[0425] The ability of ex vivo peptide-pulsed DC to stimulate CTL responses in vivo was also evaluated using the HLA-A2.1 transgenic mouse model. DC derived from Progenipoietin™-treated animals or control DC derived from bone marrow cells after expansion with GM-CSF and IL-4 were pulsed ex vivo with the HBV Pol 455 CTL epitope, washed and injected (IV) into such mice. At seven days post immunization, spleens were removed and splenocytes containing DC and CTL were restimulated twice in vitro in the presence of the HBV Pol 455 peptide. The CTL activity of three independent cultures of restimulated spleen cell cultures was assessed by measuring the ability of the CTL to lyse ⁵¹Cr-labeled target cells pulsed with or without peptide. Vigorous CTL responses were generated in animals immunized with the epitope-pulsed Progenipoietin™-derived DC as well as epitope-pulsed GM-CSF/IL-4 DC. In contrast, animals that were immunized with mock-pulsed Progenipoietin™-generated DC (no peptide) exhibited no evidence of CTL induction.

[0426] These data confirm that DC derived from Progenipoietin™ treated mice can be pulsed ex vivo with epitope and used to induce specific CTL responses in vivo. Thus, these data support the principle that Progenipoietin™-derived DC promote CTL responses in a model that manifests human MHC Class I molecules.

[0427] In vivo pharmacology studies in mice have demonstrated no apparent toxicity of reinfusion of pulsed autologous DC into animals.

Ex Vivo Activation of CTL/HTL Responses

[0428] Alternatively, ex vivo CTL or HTL responses to a particular tumor-associated antigen can be induced by incubating in tissue culture the patient's, or genetically compatible, CTL or HTL precursor cells together with a source of antigen-presenting cells (APC), such as dendritic cells, and the appropriate immunogenic peptides. After an appropriate incubation time (typically about 7-28 days), in which the precursor cells are activated and expanded into effector cells, the cells are infused back into the patient, where they will destroy (CTL) or facilitate destruction (HTL) of their specific target cells, i.e., tumor cells.

### Example 22

### Alternative Method of Identifying Motif-Bearing Peptides

[0429] Another way of identifying motif-bearing peptides is to elute them from cells bearing defined MHC molecules. For example, EBV transformed B cell lines used for tissue typing, have been extensively characterized to determine which HLA molecules they express. In certain cases these cells express only a single type of HLA molecule. These cells can then be infected with a pathogenic organism or transfected with nucleic acids that express the tumor antigen of interest. Thereafter, peptides produced by endogenous antigen processing of peptides produced consequent to infection (or as a result of transfection) will bind to HLA molecules within the cell and be transported and displayed on the cell surface.

[0430] The peptides are then eluted from the HLA molecules by exposure to mild acid conditions and their amino acid sequence determined, e.g., by mass spectral analysis (e.g., Kubo et al., J. Immunol. 152:3913, 1994). Because, as disclosed herein, the majority of peptides that bind a particular HLA molecule are motif-bearing, this is an alternative modality for obtaining the motif-bearing peptides correlated with the particular HLA molecule expressed on the cell.

[0431] Alternatively, cell lines that do not express any endogenous HLA molecules can be transfected with an expression construct encoding a single HLA allele. These cells may then be used as described, i.e., they may be infected with a pathogenic organism or transfected with nucleic acid encoding an antigen of interest to isolate peptides corresponding to the pathogen or antigen of interest that have been presented on the cell surface. Peptides obtained from such an analysis will bear motif(s) that correspond to binding to the single HLA allele that is expressed in the cell.

[0432] As appreciated by one in the art, one can perform a similar analysis on a cell bearing more than one HLA allele and subsequently determine peptides specific for each HLA allele expressed. Moreover, one of skill would also recognize that means other than infection or transfection, such as loading with a protein antigen, can be used to provide a source of antigen to the cell.

[0433] The above examples are provided to illustrate the invention but not to limit its scope. For example, the human terminology for the Major Histocompatibility Complex, namely HLA, is used throughout this document. It is to be appreciated that these principles can be extended to other species as well. Thus, other variants of the invention will be readily apparent to one of ordinary skill in the art and are encompassed by the appended claims. All publications, patents, and patent application cited herein are hereby incorporated by reference for all purposes.

TABLE I

| | | | POSITION |
|---|---|---|---|
| | POSITION | POSITION | C Terminus |
| | 2 (Primary Anchor) | 3 (Primary Anchor) | (Primary Anchor) |
| SUPERMOTIFS | | | |
| A1 | T, I, L, V, M, S | | F, W, Y |
| A2 | L, I, V, M, A, T, Q | | I, V, M, A, T, L |
| A3 | V, S, M, A, T, L, I | | R, K |
| A24 | Y, F, W, I, V, L, M, T | | F, I, Y, W, L, M |
| B7 | P | | V, I, L, F, M, W, Y, A |
| B27 | R, H, K | | F, Y, L, W, M, I, V, A |
| B44 | E, D | | F, W, L, I, M, V, A |
| B58 | A, T, S | | F, W, Y, L, I, V, M, A |
| B62 | Q, L, I, V, M, P | | F, W, Y, M, I, V, L, A |
| MOTIFS | | | |
| A1 | T, S, M | | Y |
| A1 | | D, E, A, S | Y |
| A2.1 | L, M, V, Q, I, A, T | | V, L, I, M, A, T |
| A3 | L, M, V, I, S, A, T, F, | | K, Y, R, H, F, A |
| | C, G, D | | |
| A11 | V, T, M, L, I, S, A, | | K, R, Y, H |
| | G, N, C, D, F | | |
| A24 | Y, F, W, M | | F, L, I, W |
| A*3101 | M, V, T, A, L, I, S | | R, K |
| A*3301 | M, V, A, L, F, I, S, T | | R, K |
| A*6801 | A, V, T, M, S, L, I | | R, K |
| B*0702 | P | | L, M, F, W, Y, A, I, V |
| B*3501 | P | | L, M, F, W, Y, I, V, A |
| B51 | P | | L, I, V, F, W, Y, A, M |
| B*5301 | P | | I, M, F, W, Y, A, L, V |
| B*5401 | P | | A, T, I, V, L, M, F, |
| | | | W, Y |

[0434] Bolded residues are preferred, italicized residues are less preferred: A peptide is considered motif-bearing if it has primary anchors at each primary anchor position for a motif or supermotif as specified in the above table.

TABLE Ia

| | | | POSITION |
|---|---|---|---|
| | POSITION | POSITION | C Terminus |
| | 2 (Primary Anchor) | 3 (Primary Anchor) | (Primary Anchor) |
| SUPERMOTIFS | | | |
| A1 | T, I, L, V, M, S | | F, W, Y |
| A2 | V, Q, A, T | | I, V, L, M, A, T |
| A3 | V, S, M, A, T, L, I | | R, K |
| A24 | Y, F, W, I, V, L, M, T | | F, I, Y, W, L, M |
| B7 | P | | V, I, L, F, M, W, Y, A |
| B27 | R, H, K | | F, Y, L, W, M, I, V, A |
| B58 | A, T, S | | F, W, Y, L, I, V, M, A |
| B62 | Q, L, I, V, M, P | | F, W, Y, M, I, V, L, A |
| MOTIFS | | | |
| A1 | T, S, M | | Y |
| A1 | | D, E, A, S | Y |
| A2.1 | V, Q, A, T* | | V, L, I, M, A, T |
| A3.2 | L, M, V, I, S, A, T, F, | | K, Y, R, H, F, A |
| | C, G, D | | |
| A11 | V, T, M, L, I, S, A, | | K, R, H, Y |
| | G, N, C, D, F | | |
| A24 | Y, F, W | | F, L, I, W |

*If 2 is V, or Q, the C-term is not L

[0435] Bolded residues are preferred, italicized residues are less preferred: A peptide is considered motif-bearing if it has primary anchors at each primary anchor position for a motif or supermotif as specified in the above table.

TABLE II

| POSITION | | | | |
|---|---|---|---|---|
| [symbol] | [symbol] | [symbol] | [symbol] | [symbol] |

SUPERMOTIFS

| | | | | | | |
|---|---|---|---|---|---|---|
| A1 | | | 1° Anchor | | | |
| | | | T̅,̅ I̅,̅ L̅,̅ V̅,̅ M̅,̅ S̅ | | | |
| A2 | | | 1° Anchor | | | |
| | | | L̅,̅ I̅,̅ V̅,̅ M̅,̅ A̅,̅ T̅,̅ Q̅ | | | |
| A3 | preferred | | 1° Anchor | Y, F, W, (4/5) | | |
| | | | V̅,̅ S̅,̅ M̅,̅ A̅,̅ T̅,̅ L̅,̅ I̅ | | | |
| | deleterious | D, E (3/5); P, (5/5) | | D, E, (4/5) | | |
| A24 | | | 1° Anchor | | | |
| | | | Y̅,̅ F̅,̅ W̅,̅ I̅,̅ V̅,̅ L̅,̅ M̅,̅ T̅ | | | |
| B7 | preferred | F, W, Y (5/5) | 1° Anchor | F, W, Y (4/5) | | |
| | | L, I, V, M, (3/5) | P | | | |
| | deleterious | D, E (3/5); P(5/5); | | | | D, E, (3/5) |
| | | G(4/5); A(3/5); | | | | |
| | | Q, N, (3/5) | | | | |
| B27 | | | 1° Anchor | | | |
| | | | R, H, K | | | |
| B44 | | | 1° Anchor | | | |
| | | | E, D | | | |
| B58 | | | 1° Anchor | | | |
| | | | A, T, S | | | |
| B62 | | | 1° Anchor | | | |
| | | | Q̅,̅ L̅,̅ I̅,̅ V̅,̅ M̅,̅ P̅ | | | |
| MOTIFS | | | | | | |
| A1 | preferred | G, F, Y, W, | 1° Anchor | D, E, A, | Y, F, W, | |
| 9-mer | | | S, T, M, | | | |
| | deleterious | D, E, | | R, H, K, L, I, V | A, | G, |
| | | | | M, P, | | |
| A1 | preferred | G, R, H, K | A, S, T, C, L, I V, M, | 1° Anchor | G, S, T, C, | |
| 9-mer | | | | D̅,̅ E̅,̅ A̅,̅ S̅ | | |
| | deleterious | A | R, H, K, D, E, P, Y, F, W, | | D, E, | P, Q, N, |

POSITION

| | | | |
|---|---|---|---|
| [symbol] | [symbol] | [symbol] | C-terminus |

SUPERMOTIFS

| | | | | | |
|---|---|---|---|---|---|
| A1 | | | | | 1° Anchor |
| | | | | | F, W, Y |
| A2 | | | | | 1° Anchor |
| | | | | | L̅,̅ I̅,̅ V̅,̅ M̅,̅ A̅,̅ T̅ |
| A3 | preferred | Y, F, W, (3/5) | Y, F, W, (4/5) | P, (4/5) | 1° Anchor |
| | | | | | R, K |
| | deleterious | | | | |
| A24 | | | | | 1° Anchor |
| | | | | | F̅,̅ I̅,̅ Y̅,̅ W̅,̅ L̅,̅ M̅ |
| B7 | preferred | | | F, W, Y, (3/5) | 1° Anchor |
| | | | | | V̅,̅ I̅,̅ L̅,̅ F̅,̅ M̅,̅ W̅,̅ Y̅,̅ A̅ |
| | deleterious | G, (4/5) | Q, N, (4/5) | D, E, (4/5) | |
| B27 | | | | | 1° Anchor |
| | | | | | F̅,̅ Y̅,̅ L̅,̅ W̅,̅ M̅,̅ V̅,̅ A̅ |
| B44 | | | | | 1° Anchor |
| | | | | | F̅,̅ W̅,̅ Y̅,̅ L̅,̅ I̅,̅ M̅,̅ V̅,̅ A̅ |
| B58 | | | | | 1° Anchor |
| | | | | | F̅,̅ W̅,̅ Y̅,̅ L̅,̅ I̅,̅ V̅,̅ M̅,̅ A̅ |
| B62 | | | | | 1° Anchor |
| | | | | | F̅,̅ W̅,̅ Y̅,̅ M̅,̅ I̅,̅ V̅,̅ L̅,̅ A̅ |
| MOTIFS | | | | | |
| A1 9-mer | preferred | P, | D, E, Q, N, | Y, F, W, | 1° Anchor |
| | | | | | Y |
| | deleterious | A, | | | |
| A1 9-mer | preferred | A, S, T, C, | L, I, V, M, | D, E, | 1° Anchor |
| | | | | | Y |
| | deleterious | R, H, K, | P, G, | G, P, | |

| | | POSITION | | | | |
|---|---|---|---|---|---|---|
| | | [symbol] | [symbol] | [symbol] | [symbol] | [symbol] |
| A1 | peferred | Y, F, W, | 1° Anchor | D, E, A, Q, N, | A, | Y, F, W, Q, N, |
| 10-mer | | | S, T, M | | | |
| | deleterious | G, P, | | R, H, K, G, L, I V, M, | D, E, | R, H, K, |
| A1 | preferred | Y, F, W, | S, T, C, L, I, V | 1° Anchor | A, | Y, F, W, |
| 10-mer | | | M, | D, E, A, S | | |
| | deleterious | R, H, K, | R, H, K, D, E, | | | P, |
| | | | P, Y, F, W, | | | |
| A2.1 | preferred | Y, F, W, | 1° Anchor | Y, F, W, | S, T, C, | Y, F, W, |
| 9-mer | | | L̅,̅ M̅,̅ I̅,̅ V̅,̅ Q̅,̅ A̅,̅ T̅ | | | |
| | deleterious | D, E, P, | | D, E, R, K, H | | |
| A2.1 | preferred | A, Y, F, W, | 1° Anchor | L, V, I, M, | G, | |
| 10-mer | | | L̅,̅ M̅,̅ I̅,̅ V̅,̅ Q̅,̅ A̅,̅ T̅ | | | |
| | deleterious | D, E, P, | | D, E, | R, K, H, A, | P, |
| A3 | preferred | R, H, K, | 1° Anchor | Y, F, W | P, R, H, K, Y, F, W, | A, |
| | | | L̅,̅ M̅,̅ V̅,̅ I̅,̅ S̅,̅ A̅,̅ T̅,̅ F̅,̅ C̅,̅ G̅ D̅ | | | |
| | deleterious | D, E, P, | | D, E | | |
| A11 | preferred | A, | 1° Anchor | Y, FW, | Y, F, W, | A, |
| | | | V̅,̅ T̅,̅ L̅,̅ M̅,̅ I̅,̅ S̅,̅ A̅,̅ G̅,̅ N̅,̅ C̅,̅ D̅,̅ F̅ | | | |
| | deleterious | D, E, P, | | | | |
| A24 | preferred | Y, F, W, R, H, K, | 1° Anchor | | S, T, C | |
| 9-mer | | | Y̅,̅ F̅,̅ W̅,̅ M̅ | | | |
| | deleterious | D, E, G, | | D, E, | G, | Q, N, P, |
| A24 | preferred | | 1° Anchor | | P, | Y, F, W, P, |
| 10-mer | | | Y̅,̅ F̅,̅ W̅,̅ M̅ | | | |
| | deleterious | | | G, D, E | Q, N | R, H, K |
| A3101 | preferred | R, H, K, | 1° Anchor | Y, F, W, | P, | |
| | | | M̅,̅ V̅,̅ T̅,̅ A̅,̅ L̅,̅ I̅,̅ S̅ | | | |
| | deleterious | D, E, P, | | D, E, | | A, D, E, |
| A3301 | preferred | | 1° Anchor | Y, F, W | | |
| | | | M̅,̅ V̅,̅ A̅,̅ L̅,̅ F̅,̅ I̅,̅ S̅,̅ T̅ | | | |
| | deleterious | G, P | | D, E | | |
| A6801 | preferred | Y, F, W, S, T, C, | 1° Anchor | | | Y, F, W, L, I, |
| | | | A̅,̅ V̅,̅ T̅,̅ M̅,̅ S̅,̅ L̅,̅ I̅ | | | V, M |
| | deleterious | G, P, | | D, E, G, | | R, H, K, |
| B0702 | preferred | R, H, K, F, W, Y, | 1° Anchor | R, H, K, | | R, H, K, |
| | | | P | | | |
| | deleterious | D, E, Q, N, P, | | D, E, P, | D, E, | D, E, |
| B3501 | preferred | F, W, Y, L, I, V, M, | 1° Anchor | F, W, Y, | | |
| | | | P | | | |
| | deleterious | A, G, P, | | | | G, |
| B51 | preferred | L, I, V, M, F, W, Y, | 1° Anchor | F, W, Y, | S, T, C, | F, W, Y, |
| | | | P | | | |
| | deleterious | A, G, P, D, E, R, H, K, | | | | D, E, |
| | | S, T, C, | | | | |
| B5301 | preferred | L, I, V, M, F, W, Y, | 1° Anchor | F, W, Y, | S, T, C, | F, W, Y, |
| | | | P | | | |
| | deleterious | A, G, P, Q, N, | | | | |
| B5401 | preferred | F, W, Y, | 1° Anchor | F, W, Y, L, I, V | | L, I, V, M, |
| | | | P | M, | | |
| | deleterious | G, P, Q, N, D, E, | | G, D, E, S, T, C, | | R, H, K, D, E, |

POSITION

| | | | | | [symbol] | |
|---|---|---|---|---|---|---|
| | | | | | or | |
| | | [symbol] | [symbol] | [symbol] | C-terminus | C-terminus |
| A1 | peferred | | P, A, S, T, C, | G, D, E, | P, | 1° Anchor |
| 10-mer | | | | | | Y |
| | deleterious | Q, N, A | R, H, K, Y, F, W, | R, H, K, | A | |
| A1 | preferred | | P, G, | G, | Y, F, W, | 1° Anchor |
| 10-mer | | | | | | Y |
| | deleterious | G, | | P, R, H, K, | Q, N, | |
| A2.1 | preferred | | A, | P | 1° Anchor | |
| 9-mer | | | | | V̅,̅ L̅,̅ I̅,̅ M̅,̅ A̅,̅ T̅ | |
| | deleterious | R, K, H | D, E, R, K, H | | | |
| A2.1 | preferred | G, | | F, Y, W, L, | | 1° Anchor |
| 10-mer | | | | V, I, M, | | V̅,̅ L̅,̅ I̅,̅ M̅,̅ A̅,̅ T̅ |
| | deleterious | | R, K, H, | D, E, R, K, | R, K, H, | |
| | | | | H, | | |
| A3 | preferred | Y, F, W, | | P, | 1° Anchor | |
| | | | | | K̅,̅ Y̅,̅ R̅,̅ H̅,̅ F̅,̅ A̅ | |
| | deleterious | | | | | |
| A11 | preferred | Y, F, W, | Y, F, W, | P, | 1° Anchor | |
| | | | | | K,, RY, H | |
| | deleterious | | A | G, | | |
| A24 | preferred | | Y, F, W, | Y, F, W, | 1° Anchor | |
| 9-mer | | | | | F, L, I, W | |
| | deleterious | D, E, R, H, K, | G, | A, Q, N, | | |
| A24 | preferred | | P, | | | 1° Anchor |
| 10-mer | | | | | | F, L, I, W |
| | deleterious | D, E | A | Q, N, | D, E, A, | |
| A3101 | preferred | Y, F, W, | Y, F, W, | A, P, | 1° Anchor | |
| | | | | | R, K | |
| | deleterious | D, E, | D, E, | D, E, | | |
| A3301 | preferred | | A, Y, F, W | | 1° Anchor | |
| | | | | | R, K | |
| | deleterious | | | | | |
| A6801 | preferred | | Y, F, W, | P, | 1° Anchor | |
| | | | | | R, K | |
| | deleterious | | | A, | | |
| B0702 | preferred | R, H, K, | R, H, K, | P, A, | 1° Anchor | |
| | | | | | L̅,̅ M̅,̅ F̅,̅ W̅,̅ Y̅,̅ A̅,̅ I̅,̅ V̅ | |
| | deleterious | G, D, E, | Q, N, | D, E, | | |
| B3501 | preferred | | F, W, Y, | | 1° Anchor | |
| | | | | | L̅,̅ M̅,̅ F̅,̅ W̅,̅ Y̅,̅ I̅,̅ V̅,̅ A̅ | |
| | deleterious | G, | | | | |
| B51 | preferred | | G, | F, W, Y, | 1° Anchor | |
| | | | | | L̅,̅ I̅,̅ V̅,̅ F̅,̅ W̅,̅ Y̅,̅ A̅,̅ M̅ | |
| | deleterious | G, | D, E, Q, N, | G, D, E, | | |
| B5301 | preferred | | L, I, V, M, F, | F, W, Y, | 1° Anchor | |
| | | | W, Y, | | I̅,̅ M̅,̅ F̅,̅ W̅,̅ Y̅,̅ A̅,̅ L̅,̅ V̅ | |
| | deleterious | G, | R, H, K, Q, N, | D, E, | | |
| B5401 | preferred | | A, L, I, V, M, | F, W, Y, A, P, | 1° Anchor | |
| | | | | | A̅,̅ T̅,̅ I̅,̅ V̅,̅ L̅,̅ M̅,̅ F̅,̅ W̅,̅ Y̅ | |
| | deleterious | D, E, | Q, N, D, G, E, | D, E, | | |

Italicized residues indicate less preferred or “tolerated” residues.
The information in Table II is specific for 9-mers unless otherwise specified.

[0436] Secondary anchor specificities are designated for each position independently.

TABLE III

| | | POSITION | | | | |
|---|---|---|---|---|---|---|
| MOTIFS | | [symbol] | [symbol] | [symbol] | [symbol] | [symbol] |
| DR4 | preferred | F, M, Y, | M, | T, | | I, |
| | | L, I, V, W, | | | | |
| | deleterious | | | | W, | |
| DR1 | preferred | M, F, | | | P, A, M, Q, | |
| | | L, I, V, W, Y, | | | | |
| | deleterious | | C | C, H | F, D | C, W, D |
| DR7 | preferred | M, F, | M, | W, | A, | |
| | | L, I, V, W, Y, | | | | |
| | deleterious | | C, | | G, | |

| | |
|---|---|
| DR Supermotif | M, F, |
| | L, I, V, W, Y, |

| | | POSITION | | | |
|---|---|---|---|---|---|
| MOTIFS | | [symbol] | [symbol] | [symbol] | [symbol] |
| DR4 | preferred | V, S, T, | M, H, | | M, H |
| | | C, P, A, L, I, M, | | | |
| | deleterious | | R, | | W, D, E |
| DR1 | preferred | V, M, A, T, | M, | | A, V, M |
| | | S, P, L, I, C, | | | |
| | deleterious | | G, D, E, | D | |
| DR7 | preferred | I, V, M, S, A, | M, | | I, V |
| | | C, T, P, L, | | | |
| | deleterious | | G, R, D, | N | G |

| | |
|---|---|
| DR Supermotif | V, M, S, T, A, |
| | C, P, L, I, |

| | POSITION | | | | | |
|---|---|---|---|---|---|---|
| DR3 MOTIFS | [symbol] | [symbol] | [symbol] | [symbol] | [symbol] | [symbol] |
| motif a | L, I, V, M, | | | D | | |
| preferred | F, Y, | | | | | |
| motif b | L, I, V, M, | | | D, N, Q, | | K, R, H |
| preferred | F, A, Y, | | | E, S, T | | |

[0437] Italicized residues indicate less preferred or “tolerated” residues. Secondary anchor specificities are designated for each position independently.

TABLE IV
HLA Class I Standard Peptide Binding Affinity.

| | | | STANDARD |
|---|---|---|---|
| | STANDARD | SEQUENCE | BINDING AFFINITY |
| ALLELE | PEPTIDE | (SEQ ID NO:) | (nM) |
| A*0101 | 944.02 | YLEPAIAKY | 25 |
| A*0201 | 941.01 | FLPSDYFPSV | 5.0 |
| A*0202 | 941.01 | FLPSDYFPSV | 4.3 |
| A*0203 | 941.01 | FLPSDYFPSV | 10 |
| A*0205 | 941.01 | FLPSDYFPSV | 4.3 |
| A*0206 | 941.01 | FLPSDYFPSV | 3.7 |
| A*0207 | 941.01 | FLPSDYFPSV | 23 |
| A*6802 | 1072.34 | YVIKVSARV | 8.0 |
| A*0301 | 941.12 | KVFPYALINK | 11 |
| A*1101 | 940.06 | AVDLYHFLK | 6.0 |
| A*3101 | 941.12 | KVFPYALINK | 18 |
| A*3301 | 1083.02 | STLPETYVVRR | 29 |
| A*6801 | 941.12 | KVFPYALINK | 8.0 |
| A*2402 | 979.02 | AYIDNYNKF | 12 |
| B*0702 | 1075.23 | APRTLVYLL | 5.5 |
| B*3501 | 1021.05 | FPFKYAAAF | 7.2 |
| B51 | 1021.05 | FPFKYAAAF | 5.5 |
| B*5301 | 1021.05 | FPFKYAAAF | 9.3 |
| B*5401 | 1021.05 | FPFKYAAAF | 10 |

[0438] TABLE V
HLA Class II Standard Peptide Binding Affinity.

| | | | | Binding Affinity |
|---|---|---|---|---|
| Allele | Nomenclature | Standard Peptide | Sequence (SEQ ID NO:) | (nM) |
| DRB1*0101 | DR1 | 515.01 | PKYVKQNTLKLAT | 5.0 |
| DRB1*0301 | DR3 | 829.02 | YKTIAFDEEARR | 300 |
| DRB1*0401 | DR4w4 | 515.01 | PKYVKQNTLKLAT | 45 |
| DRB1*0404 | DR4w14 | 717.01 | YARFQSQTTLKQKT | 50 |
| DRB1*0405 | DR4w15 | 717.01 | YARFQSQTTLKQKT | 38 |
| DRB1*0701 | DR7 | 553.01 | QYIKANSKFIGITE | 25 |
| DRB1*0802 | DR8w2 | 553.01 | QYIKANSKFIGITE | 49 |
| DRB1*0803 | DR8w3 | 553.01 | QYIKANSKFIGITE | 1600 |
| DRB1*0901 | DR9 | 553.01 | QYIKANSKFIGITE | 75 |
| DRB1*1101 | DR5w11 | 553.01 | QYIKANSKFIGITE | 20 |
| DRB1*1201 | DR5w12 | 1200.05 | EALIHQLKINPYVLS | 298 |
| DRB1*1302 | DR6w19 | 650.22 | QYIKANAKFIGITE | 3.5 |
| DRB1*1501 | DR2w2β1 | 507.02 | GRTQDENPVVHFFKNIVTPRTPPP | 9.1 |
| DRB3*0101 | DR52a | 511 | NGQIGNDPNRDIL | 470 |
| DRB4*0101 | DRw53 | 717.01 | YARFQSQTTLKQKT | 58 |
| DRB5*0101 | DR2w2β2 | 553.01 | QYIKANSKFIGITE | 20 |

[0439] TABLE VI

| | Allelle-specific HLA-supertype members | |
|---|---|---|
| HLA-supertype | Verified^{a} | Predicted^{b} |
| A1 | A*0101, A*2501, A*2601, A*2602, A*3201 | A*0102, A*2604, A*3601, A*4301, A*8001 |
| A2 | A*0201, A*0202, A*0203, A*0204, A*0205, A*0206, A*0207, | A*0208, A*0210, A*0211, A*0212, A*0213 |
| | A*0209, A*0214, A*6802, A*6901 | |
| A3 | A*0301, A*1101, A*3101, A*3301, A*6801 | A*0302, A*1102, A*2603, A*3302, A*3303, A*3401, |
| | | A*3402, A*6601, A*6602, A*7401 |
| A24 | A*2301, A*2402, A*3001 | A*2403, A*2404, A*3002, A*3003 |
| B7 | B*0702, B*0703, B*0704, B*0705, B*1508, B*3501, B*3502, B*3503, | B*1511, B*4201, B*5901 |
| | B*3503, B*3504, B*3505, B*3506, B*3507, B*3508, B*5101, B*5102, | |
| | B*5103, B*5104, B*5105, B*5301, B*5401, B*5501, B*5502, B*5601, | |
| | B*5602, B*6701, B*7801 | |
| B27 | B*1401, B*1402, B*1509, B*2702, B*2703, B*2704, B*2705, B*2706, | B*2701, B*2707, B*2708, B*3802, B*3903, B*3904, |
| | B*3801, B*3901, B*3902, B*7301 | B*3905, B*4801, B*4802, B*1510, B*1518, B*1503 |
| B44 | B*1801, B*1802, B*3701, B*4402, B*4403, B*4404, B*4001, B*4002, | B*4101, B*4501, B*4701, B*4901, B*5001 |
| | B*4006 | |
| B58 | B*5701, B*5702, B*5801, B*5802, B*1516, B*1517 | |
| B62 | B*1501, B*1502, B*1513, B*5201 | B*1301, B*1302, B*1504, B*1505, B*1506, B*1507, |
| | | B*1515, B*1520, B*1521, B*1512, B*1514, B*1510 |

^{a}Verified alleles include alleles whose specificity has been determined by pool sequencing analysis, peptide binding assays, or by analysis of the sequences of CTL epitopes.
^{b}Predicted alleles are alleles whose specificity is predicted on the basis of B and F pocket structure to overlap with the supertype specificity.

[0440] TABLE VII

Prostate A01 Supermotif Peptides
with Binding Data

| | | | | | |
|---|---|---|---|---|---|
| | | | No. of | | Seq. |
| | | | Amino | | Id. |
| Protein | Sequence | Position | Acids | A*0101 | No. |

| | | | | | |
|---|---|---|---|---|---|
| PAP | ALFPPEGVSIW | 122 | 11 | | 1 |
| Kallikrein | ALGTTCYASGW | 147 | 11 | | 2 |
| PSA | ALGTTCYASGW | 143 | 11 | | 3 |
| Kallikrein | ALPEKPAVY | 235 | 9 | | 4 |
| PSA | ALPERPSLY | 231 | 9 | 0.0110 | 5 |
| PSM | ALVLAGGF | 25 | 8 | | 6 |
| PSM | ALVLAGGFF | 25 | 9 | | 7 |
| PAP | AMTNLAALF | 116 | 9 | | 8 |
| PAP | ASCHLTELY | 311 | 9 | 0.7700 | 9 |
| PAP | ASCHLTELYF | 311 | 10 | | 10 |
| PSM | ASGRARYTKNW | 531 | 11 | | 11 |
| PSM | ASKFSERLQDF | 643 | 11 | | 12 |
| PAP | ASLSLGFLF | 12 | 9 | | 13 |
| PSM | ASWDAEEF | 419 | 8 | | 14 |
| PSM | ATARRPRW | 13 | 8 | | 15 |
| PSM | AVATARRPRW | 11 | 10 | | 16 |
| PSM | AVVHEIVRSF | 393 | 10 | | 17 |
| Kallikrein | AVYTKVVHY | 241 | 9 | | 18 |
| Kallikrein | CLKKNSQVW | 66 | 9 | | 19 |
| PSM | CSGKIVIARY | 196 | 10 | 0.0160 | 20 |
| PAP | CSPSCPLERF | 347 | 10 | | 21 |
| PSM | DIVPPFSAF | 156 | 9 | | 22 |
| PAP | DLFGIWSKVY | 201 | 10 | | 23 |
| PSA | DMSLLKNRF | 98 | 9 | | 24 |
| PSM | DSLFSAVKNF | 630 | 10 | | 25 |
| PSM | DSSIEGNY | 453 | 8 | | 26 |
| PSM | DSVELAHY | 106 | 8 | | 27 |
| PAP | DVYNGLLPPY | 301 | 10 | | 28 |
| PSM | EIFNTSLF | 137 | 8 | | 29 |
| PSM | ELAHYDVLLSY | 109 | 11 | | 30 |
| PSM | ELANSIVLPF | 586 | 10 | | 31 |
| PAP | ELGEYIRKRY | 80 | 10 | | 32 |
| PSM | ELKAENIKKF | 64 | 10 | | 33 |
| PAP | ELKFVTLVF | 34 | 9 | | 34 |
| PSM | ELKSPDEGF | 480 | 9 | | 35 |
| PAP | ELSELSLLSLY | 237 | 11 | | 36 |
| PAP | ELSLLSLY | 240 | 8 | | 37 |
| PSM | ELVEKFYDPMF | 560 | 11 | | 38 |
| PAP | ELVGPVIPQDW | 358 | 11 | | 39 |
| PAP | ELYFEKGEY | 317 | 9 | | 40 |
| PAP | ELYFEKGEYF | 317 | 10 | | 41 |
| PSM | EMKTYSVSF | 621 | 9 | | 42 |
| PAP | ESETLKSEEF | 168 | 10 | | 43 |
| PSM | ESFPGIYDALF | 703 | 11 | | 44 |
| PSM | ESKVDPSKAW | 716 | 10 | | 45 |
| PAP | ESSWPQGF | 60 | 8 | | 46 |
| PAP | ESVHNFTLPSW | 216 | 11 | | 47 |
| PAP | ESYKHEQVY | 95 | 9 | 0.0980 | 48 |
| PAP | ETLKSEEF | 170 | 8 | | 49 |
| PSM | ETNKYSGY | 542 | 8 | | 50 |
| PSM | ETNKFSGYPLY | 542 | 11 | | 51 |
| PSM | ETYELVEKF | 557 | 9 | | 52 |
| PSM | ETYELVEKFY | 557 | 10 | 0.0260 | 53 |
| PSM | EVKRQIYVAAF | 727 | 11 | | 54 |
| PAP | FLFLLFFW | 18 | 8 | | 55 |
| PSM | FLLGFLFGW | 33 | 9 | | 56 |
| PSM | FLLGFLFGWF | 33 | 10 | | 57 |
| PSA | FLTLSVTW | 3 | 8 | | 58 |
| Kallikrein | FMLCAGLW | 195 | 8 | | 59 |
| PSA | FMLCAGRW | 191 | 8 | | 60 |
| PSM | FSERLQDF | 646 | 8 | | 61 |
| PSM | FSGYPLYHSVY | 546 | 11 | | 62 |
| PSM | FTEIASKK | 639 | 8 | | 63 |
| PSM | GIASGRARY | 529 | 9 | 0.0025 | 64 |
| PAP | GIWSKVYDPLY | 204 | 11 | | 65 |
| PSM | GLDSVELAHY | 104 | 10 | 0.4800 | 66 |
| PAP | GLHGQDLF | 196 | 8 | | 67 |
| PAP | GLHGQDLFGIW | 196 | 11 | | 68 |
| PSM | GLLGSTEW | 427 | 8 | | 69 |
| PSM | GLPDRPFY | 680 | 8 | | 70 |
| PAP | GLQMALDVY | 295 | 9 | | 71 |
| PAP | GMEQHYELGEY | 74 | 11 | | 72 |
| PSM | GMPEGDLVY | 168 | 9 | 0.0001 | 73 |
| PSM | GSAPPDSSW | 311 | 9 | | 74 |
| PSM | GSGNDFEVF | 516 | 9 | | 75 |
| PSM | GSGNDFEVFF | 516 | 10 | | 76 |
| Kallikrein | GSIEPEEF | 158 | 8 | | 77 |
| PSA | GSIEPEEF | 154 | 8 | | 78 |
| PSM | GTLKKEGW | 403 | 8 | | 79 |
| Kallikrein | GTTCYASGW | 149 | 9 | | 80 |
| PSA | GTTGYASGW | 145 | 9 | | 81 |
| PSM | GVILYSDPADY | 224 | 11 | | 82 |
| PSM | GVKSYPDGW | 238 | 9 | | 83 |
| Kallikrein | GVLQGITSW | 221 | 9 | | 84 |
| PSA | GVLQGITSW | 217 | 9 | | 85 |
| Kallikrein | GVLVHPQW | 52 | 8 | | 86 |
| PSA | GVLVHPQW | 48 | 8 | | 87 |
| PAP | GVSIWNPILLW | 128 | 11 | | 88 |
| PSM | HLAGTEQNF | 82 | 9 | | 89 |
| PAP | HMKRATQIPSY | 270 | 11 | | 90 |
| Kallikrein | HSFPHPLY | 94 | 8 | 0.0260 | 91 |
| PSA | HSFPHPLY | 90 | 8 | 0.0260 | 92 |
| Kallikrein | HSQPWQVAVY | 34 | 10 | | 93 |
| PSM | HSTNEVTRIY | 347 | 10 | 0.0048 | 94 |
| PSM | IINEDGNEIF | 130 | 10 | | 95 |
| PSM | ILFASWDAEEF | 416 | 11 | | 96 |
| PSM | ILGGHRDSW | 373 | 9 | | 97 |
| PSM | ILGGHRDSWVF | 373 | 11 | | 98 |
| PSA | ILLGRHSLF | 69 | 9 | | 99 |
| PSA | ILSRIVGGW | 17 | 9 | | 100 |
| PSM | ILYSDPADY | 226 | 9 | | 101 |
| PSM | ILYSDPADYF | 226 | 10 | | 102 |
| PSM | ISKLGSGNDF | 512 | 10 | | 103 |
| PSM | ITPKHNMKAF | 52 | 10 | | 104 |
| PSM | IVIARYGKVF | 200 | 10 | | 105 |
| PSM | IVLPFDCRDY | 591 | 10 | | 106 |
| PSM | IVPPFSAF | 157 | 8 | | 107 |
| PSM | KIVIARYGKVF | 199 | 11 | | 108 |
| PSM | KLGSGNDF | 514 | 8 | | 109 |
| PSM | KLGSGNDFEVF | 514 | 11 | | 110 |
| PAP | KLSGLHGQDLF | 193 | 11 | | 111 |
| PSM | KTYSVSFDSLF | 623 | 11 | | 112 |
| PSM | KVDPSKAW | 718 | 8 | | 113 |
| PSM | KVPYNVGPGF | 324 | 10 | | 114 |
| Kallikrein | KVVHYRKW | 245 | 8 | | 115 |
| PSA | KVVHYRKW | 241 | 8 | | 116 |
| PSA | LILSRIVGGW | 16 | 10 | | 117 |
| Kallikrein | LIQSRIVGGW | 20 | 10 | | 118 |
| PSM | LLGFLFGW | 34 | 8 | | 119 |
| PSM | LLGFLFGWF | 34 | 9 | | 120 |
| PSA | LLGRHSLF | 70 | 8 | | 121 |
| PSM | LLQERGVAY | 441 | 9 | | 122 |
| Kallikrein | LLSNDMCARAY | 178 | 11 | | 123 |
| PSM | LMFLERAF | 668 | 8 | | 124 |
| PAP | LSEDQLLY | 148 | 8 | | 125 |
| PAP | LSEDQLLYLPF | 148 | 11 | | 126 |
| PAP | LSELSLLSLY | 238 | 10 | 12.0000 | 127 |
| PAP | LSGLHGQDLF | 194 | 10 | | 128 |
| PAP | LSLGFLFLLF | 14 | 10 | | 129 |
| PAP | LSLGFLFLLFF | 14 | 11 | | 130 |
| Kallikrein | LSNDMCARAY | 179 | 10 | | 131 |
| PSA | LSRIVGGW | 18 | 8 | | 132 |
| PSM | LSYPNKTHPNY | 117 | 11 | | 133 |
| PAP | LTELYFEKGEY | 315 | 11 | | 134 |
| PSM | LTPGYPANEY | 268 | 10 | 0.0082 | 135 |
| PAP | LTQLGMEQHY | 70 | 10 | 0.6200 | 136 |
| PSM | LVEKFYDPMF | 561 | 10 | | 137 |
| PAP | LVGPVIPQDW | 359 | 10 | | 138 |
| PSM | LVLAGGFF | 26 | 8 | | 139 |
| PSM | MMNDQLMF | 663 | 8 | | 140 |
| PAP | MSAMTNLAALF | 114 | 11 | | 141 |
| PSA | MSLLKNRF | 99 | 8 | | 142 |
| PAP | MTNLAALF | 117 | 8 | | 143 |
| PSM | NIKKFLYNF | 69 | 9 | | 144 |
| PSM | NITPKHNMKAF | 51 | 11 | | 145 |
| PSM | NVGPGFTGNF | 328 | 10 | | 146 |
| PSM | NVSDIVPPF | 153 | 9 | | 147 |
| PAP | PIKESSWPQGF | 57 | 11 | | 148 |
| PSM | PLGLPDRPF | 678 | 9 | | 149 |
| PSM | PLGLPDRPFY | 678 | 10 | | 150 |
| PSA | PLILSRIVGGW | 15 | 11 | | 151 |
| Kallikrein | PLIQSRIVGGW | 19 | 11 | | 152 |
| PAP | PLSEDQLLY | 147 | 9 | 1.2000 | 153 |
| PSM | PLTPGYPANEY | 267 | 11 | | 154 |
| PAP | PLYCESVHNF | 212 | 10 | | 155 |
| PSM | PLYHSVYETY | 550 | 10 | | 156 |
| PAP | PSCPLERF | 349 | 8 | | 157 |
| PSM | PSIPVHPIGY | 290 | 10 | | 158 |
| PSM | PSIPVHPIGYY | 290 | 11 | | 159 |
| PSA | PSLYTKVVHY | 236 | 10 | 0.0010 | 160 |
| PAP | PSYKKLIMY | 278 | 9 | 0.0031 | 161 |
| PAP | PTDPIKESSW | 54 | 10 | | 162 |
| PSM | PVHPIGYY | 293 | 8 | | 163 |
| Kallikrein | PVSHSFPHPLY | 91 | 11 | | 164 |
| PAP | QIPSYKKLIMY | 276 | 11 | | 165 |
| PSM | QIQSQWKEF | 95 | 9 | | 166 |
| PSM | QLAGAKGVILY | 218 | 11 | | 167 |
| PSM | QLAKQIQSQW | 91 | 10 | | 168 |
| PAP | QLGMEQHY | 72 | 8 | | 169 |
| PSM | QLMFLERAF | 667 | 9 | | 170 |
| PAP | QLTQLGMEQHY | 69 | 11 | | 171 |
| Kallikrein | QSRIVGGW | 22 | 8 | | 172 |
| Kallikrein | QVAVYSHGW | 39 | 9 | | 173 |
| PSA | QVFQVSHSF | 84 | 9 | | 174 |
| PSA | QVHPQKVTKF | 182 | 10 | | 175 |
| PSM | QVRGGMVF | 578 | 8 | | 176 |
| PSA | QVSHSFPHPLY | 87 | 11 | | 177 |
| Kallikrein | QVWLGRHNLF | 72 | 10 | | 178 |
| PSM | RISKLGSGNDF | 511 | 11 | | 179 |
| PSM | RLGIASGRARY | 527 | 11 | | 180 |
| PAP | RLHPYKDF | 180 | 8 | | 181 |
| PSM | RLLQERGVAY | 440 | 10 | | 182 |
| PSM | RMMNDQLMF | 662 | 9 | | 183 |
| PSM | RSFGTLKKEGW | 400 | 11 | | 184 |
| PAP | RSVLAKELKF | 28 | 10 | | 185 |
| PSM | RTILFASW | 414 | 8 | | 186 |
| PSM | RVDCTPLMY | 463 | 9 | 11.0000 | 187 |
| Kallikrein | RVPVSHSF | 89 | 8 | | 188 |
| PSM | SIINEDGNEIF | 129 | 11 | | 189 |
| PSM | SIPVHPIGY | 291 | 9 | | 190 |
| PSM | SIPVHPIGYY | 291 | 10 | | 191 |
| PSM | SIVLPFDGRDY | 590 | 11 | | 192 |
| PAP | SIWNPILLW | 130 | 9 | | 193 |
| PSM | SLFEPPPPGY | 142 | 10 | | 194 |
| PSM | SLFSAVKNF | 631 | 9 | | 195 |
| PAP | SLGFLFLLF | 15 | 9 | | 196 |
| PAP | SLGFLFLLFF | 15 | 10 | | 197 |
| PAP | SLGFLFLLFFW | 15 | 11 | | 198 |
| PAP | SLSLGFLF | 13 | 8 | | 199 |
| PAP | SLSLGFLFLLF | 13 | 11 | | 200 |
| PSA | SLYTKVVHY | 237 | 9 | 0.0017 | 201 |
| PSM | SMKHPQEMKTY | 615 | 11 | | 202 |
| PSM | SSHNKYAGESF | 695 | 11 | | 203 |
| PSM | SSWRGSLKVPY | 317 | 11 | | 204 |
| PSM | STNEVTRIY | 348 | 9 | 0.0430 | 205 |
| PAP | SVHNFTLPSW | 217 | 10 | | 206 |
| PSA | SVILLGRHSLF | 67 | 11 | | 207 |
| PAP | SVLAKELKF | 29 | 9 | | 208 |
| PSM | SVSFDSLF | 626 | 8 | | 209 |
| PSM | TLRGAVEPDRY | 361 | 11 | | 210 |
| PSM | TLRVDCTPLMY | 461 | 11 | | 211 |
| PSM | TSLFEPPPPGY | 141 | 11 | | 212 |
| Kallikrein | TTCYASGW | 150 | 8 | | 213 |
| PSA | TTCYASGW | 146 | 8 | | 214 |
| PSM | TVAQVRGGMVF | 575 | 11 | | 215 |
| PAP | TVPLSEDQLLY | 145 | 11 | | 216 |
| PSM | VIARYGKVF | 201 | 9 | | 217 |
| PSM | VILGGHRDSW | 372 | 10 | | 218 |
| PSA | VILLGRHSLF | 68 | 10 | | 219 |
| PSM | VILYSDPADY | 225 | 10 | | 220 |
| PSM | VILYSDPADYF | 225 | 11 | | 221 |
| PSM | VIYAPSSHNKY | 690 | 11 | | 222 |
| PSM | VLAGGFFLLGF | 27 | 11 | | 223 |
| PAP | VLAKELKF | 30 | 8 | | 224 |
| PSM | VLPFDCRDY | 592 | 9 | | 225 |
| Kallikrein | VLQGITSW | 222 | 8 | | 226 |
| PSA | VLQGITSW | 218 | 8 | | 227 |
| PSM | VLRKYADKIY | 603 | 10 | | 228 |
| PSM | VLRMMNDQLMF | 660 | 11 | | 229 |
| PSM | VSDIVPPF | 154 | 8 | | 230 |
| PSM | VSDIVPPFSAF | 154 | 11 | | 231 |
| PAP | VSGLQMALDVY | 293 | 11 | | 232 |
| Kallikrein | VSHSFPHPLY | 92 | 10 | 0.1500 | 233 |
| PSA | VSHSFPHPLY | 88 | 10 | 0.1500 | 234 |
| PAP | VSIWNPILLW | 129 | 10 | | 235 |
| Kallikrein | VTEFMLCAGLW | 192 | 11 | | 236 |
| PSA | VTKFMLCAGRW | 188 | 11 | | 237 |
| PSA | VVFLTLSVTW | 1 | 10 | | 238 |
| PSM | VVHEIVRSF | 394 | 9 | | 239 |
| PSM | VVLRKYADKIY | 602 | 11 | | 240 |
| Kallikrein | WLGRHNLF | 74 | 8 | | 241 |
| PAP | WSKVYDPLY | 206 | 9 | 0.0046 | 242 |
| PSM | WTKKSPSPEF | 497 | 10 | | 243 |
| PAP | YIRKRYRKF | 84 | 9 | | 244 |
| PAP | YLPFRNCPRF | 155 | 10 | | 245 |
| PSM | YSDPADYF | 228 | 8 | | 246 |
| Kallikrein | YSEKVTEF | 188 | 8 | | 247 |
| PSM | YSVSFDSLF | 625 | 9 | | 248 |
| PSM | YTKNWETNKF | 537 | 10 | | 249 |
| Kallikrein | YTKVVHYRKW | 243 | 10 | | 250 |
| PSA | YTKVVHYRKW | 239 | 10 | | 251 |
| PSM | YVILGGHRDSW | 371 | 11 | | 252 |
| PSM | YVNYARTEDF | 176 | 10 | | 253 |
| PSM | YVNYARTEDFF | 176 | 11 | | 254 |

[0441] TABLE VIII
Prostate A02 Supermotif Peptides with Binding Information

| | | | | | | | | | |
|---|---|---|---|---|---|---|---|---|---|
| | | | No. of | | | | | | Seq. |
| | | | Amino | | | | | | Id. |
| Protein | Sequence | Position | Acids | A*0201 | A*0202 | A*0203 | A*0206 | A*6802 | No. |

| | | | | | | | | | |
|---|---|---|---|---|---|---|---|---|---|
| PSM | AAAETLSEV | 741 | 9 | 0.0002 | | | | | 255 |
| PSM | AAAETLSEVA | 741 | 10 | | | | | | 256 |
| PSM | AAETLSEV | 742 | 8 | | | | | | 257 |
| PSM | AAETLSEVA | 742 | 9 | | | | | | 258 |
| PSM | AAFTVQAA | 735 | 8 | | | | | | 259 |
| PSM | AAFTVQAAA | 735 | 9 | | | | | | 260 |
| PSM | AAFTVQAAAET | 735 | 11 | | | | | | 261 |
| PSA | AAHCIRNKSV | 59 | 10 | 0.0002 | | | | | 262 |
| PSA | AAHCIRNKSVI | 59 | 11 | 0.0010 | 0.0100 | 0.0140 | 0.0004 | 0.0018 | 263 |
| Kallikrein | AAHCLKKNSQV | 63 | 11 | 0.0003 | 0.0006 | 0.0450 | 0.0001 | 0.0004 | 264 |
| PAP | AALFPPEGV | 121 | 9 | 0.0002 | | | | | 265 |
| PAP | AALFPPEGVSI | 121 | 11 | | | | | | 266 |
| PSA | AAPLILSRI | 13 | 9 | 0.0002 | | | | | 267 |
| PSA | AAPLILSRIV | 13 | 10 | 0.0002 | | | | | 268 |
| PAP | AAPLLLARA | 3 | 9 | | | | | | 269 |
| PAP | AAPLLLARAA | 3 | 10 | | | | | | 270 |
| PAP | AASLSLGFL | 11 | 9 | 0.0002 | | | | | 271 |
| PAP | AASLSLGFLFL | 11 | 11 | | | | | | 272 |
| PSM | AAVVHEIV | 392 | 8 | | | | | | 273 |
| PAP | ALDVYNGL | 299 | 8 | | | | | | 274 |
| PAP | ALDVYNGLL | 299 | 9 | 0.0520 | | | | | 275 |
| PSM | ALFDIESKV | 711 | 9 | 0.0590 | 6.0000 | 7.2000 | 0.0250 | 0.0009 | 276 |
| PAP | ALFPPEGV | 122 | 8 | | | | | | 277 |
| PAP | ALFPPEGVSI | 122 | 10 | 0.0044 | | | | | 278 |
| Kallikrein | ALGTTCYA | 147 | 8 | 0.0230 | | | | | 279 |
| PSA | ALGTTCYA | 143 | 8 | 0.0230 | | | | | 280 |
| Kallikrein | ALPEKPAV | 235 | 8 | 0.0009 | 0.0200 | 0.0510 | 0.0001 | −0.0001 | 281 |
| Kallikrein | ALPEKPAVYT | 235 | 10 | 0.0003 | 0.0050 | 0.0028 | 0.0005 | −0.0001 | 282 |
| PSA | ALPERPSL | 231 | 8 | 0.0002 | | | | | 283 |
| PSA | ALPERPSLYT | 231 | 10 | 0.0008 | | | | | 284 |
| Kallikrein | ALSVGCTGA | 9 | 9 | 0.0410 | 0.0038 | 0.1100 | 0.0066 | −0.0001 | 285 |
| Kallikrein | ALSVGCTGAV | 9 | 10 | 0.0180 | 0.2600 | 0.4000 | 0.0051 | 0.0012 | 286 |
| PSM | ALVLAGGFFL | 25 | 10 | 0.0150 | | | | | 287 |
| PSM | ALVLAGGFFLL | 25 | 11 | | | | | | 288 |
| PAP | AMTNLAAL | 116 | 8 | | | | | | 289 |
| PSM | AQKLLEKM | 302 | 8 | | | | | | 290 |
| PSM | AQLAGAKGV | 217 | 9 | | | | | | 291 |
| PSM | AQLAGAKGVI | 217 | 10 | | | | | | 292 |
| PSM | AQLAGAKGVIL | 217 | 11 | | | | | | 293 |
| PSA | AQVHPQKV | 181 | 8 | | | | | | 294 |
| PSA | AQVHPQKVT | 181 | 9 | 0.0002 | | | | | 295 |
| PSM | AQVRGGMV | 577 | 8 | | | | | | 296 |
| PSM | AQVRGGMVFEL | 577 | 11 | | | | | | 297 |
| PSM | ATARRPRWL | 13 | 9 | 0.0002 | | | | | 298 |
| PSM | ATARRPRWLCA | 13 | 11 | | | | | | 299 |
| PAP | ATEDTMTKL | 227 | 9 | 0.0002 | | | | | 300 |
| PAP | ATLGKLSGL | 189 | 9 | 0.0005 | | | | | 301 |
| PSM | ATNITPKHNM | 49 | 10 | | | | | | 302 |
| PAP | ATQIPSYKKL | 274 | 10 | 0.0002 | | | | | 303 |
| PAP | ATQIPSYKKLI | 274 | 11 | | | | | | 304 |
| PSM | AVATARRPRWL | 11 | 11 | | | | | | 305 |
| PSA | AVCGGVLV | 44 | 8 | 0.0003 | | | | | 306 |
| PSM | AVEPDRYV | 365 | 8 | | | | | | 307 |
| PSM | AVEPDRYVI | 365 | 9 | 0.0001 | | | | | 308 |
| PSM | AVEPDRYVIL | 365 | 10 | 0.0002 | | | | | 309 |
| PSM | AVGLPSIPV | 286 | 9 | 0.0042 | | | | | 310 |
| PSM | AVKNFTEI | 635 | 8 | | | | | | 311 |
| PSM | AVKNFTEIA | 635 | 9 | | | | | | 312 |
| PSA | AVKVMDLPT | 131 | 9 | 0.0001 | | | | | 313 |
| Kallikrein | AVPLIQSRI | 17 | 9 | 0.0001 | 0.0026 | 0.0013 | 0.0020 | 0.0610 | 314 |
| Kallikrein | AVPLIQSRIV | 17 | 10 | 0.0014 | 0.0510 | 0.0490 | 0.0035 | 0.0058 | 315 |
| PSM | AVVLRKYA | 601 | 8 | | | | | | 316 |
| PSM | AVVLRKYADKI | 601 | 11 | | | | | | 317 |
| Kallikrein | AVYSHGWA | 41 | 8 | −0.0001 | 0.0005 | 0.0011 | 0.0004 | 0.0003 | 318 |
| PSM | CAGALVLA | 22 | 8 | | | | | | 319 |
| Kallikrein | CAGLWTGGKDT | 198 | 11 | 0.0001 | 0.0003 | 0.0027 | −0.0001 | −0.0002 | 320 |
| PSA | CAGRWTGGKST | 194 | 11 | 0.0013 | 0.0370 | 0.0250 | 0.0002 | 0.0081 | 321 |
| Kallikrein | CALPEKPA | 234 | 8 | −0.0001 | −0.0001 | −0.0001 | −0.0001 | −0.0001 | 322 |
| Kallikrein | CALPEKPAV | 234 | 9 | 0.0002 | 0.0013 | 0.1100 | 0.0004 | 0.0001 | 323 |
| Kallikrein | CALPEKPAVYT | 234 | 11 | 0.0008 | 0.0033 | 0.0120 | 0.1700 | −0.0002 | 324 |
| PSA | CALPERPSL | 230 | 9 | 0.0001 | | | | | 325 |
| PSA | CALPERPSLYT | 230 | 11 | 0.0008 | 0.0130 | 0.0071 | 0.0016 | 0.0023 | 326 |
| PSA | CAQVHPQKV | 180 | 9 | 0.0002 | | | | | 327 |
| PSA | CAQVHPQKVT | 180 | 10 | 0.0001 | | | | | 328 |
| Kallikrein | CARAYSEKV | 184 | 9 | −0.0001 | 0.0006 | 0.0025 | 0.0002 | 0.0012 | 329 |
| Kal1ikrein | CARAYSEKVT | 184 | 10 | 0.0074 | 0.0710 | 0.0200 | 0.0030 | 0.0071 | 330 |
| PSA | CIRNKSVI | 62 | 8 | 0.0001 | | | | | 331 |
| PSA | CIRNKSVIL | 62 | 9 | 0.0003 | | | | | 332 |
| PSA | CIRNKSVILL | 62 | 10 | 0.0001 | | | | | 333 |
| Kallikrein | CLKKNSQV | 66 | 8 | 0.0001 | 0.0006 | 0.0006 | −0.0001 | −0.0001 | 334 |
| Kallikrein | GLKKNSQVWL | 66 | 10 | 0.0001 | 0.0220 | 0.0083 | 0.0002 | −0.0001 | 335 |
| PAP | CMTTNSHQGT | 372 | 10 | 0.0002 | | | | | 336 |
| Kallikrein | CTGAVPLI | 14 | 8 | 0.0001 | 0.0001 | 0.0001 | 0.0012 | 0.0004 | 337 |
| PSM | CTPLMYSL | 466 | 8 | | | | | | 338 |
| PSM | CTPLMYSLV | 466 | 9 | 0.0004 | | | | | 339 |
| PSA | CVDLHVISNDV | 169 | 11 | 0.0001 | | | | | 340 |
| Kallikrein | CVSLHLLSNDM | 173 | 11 | 0.0002 | 0.0031 | 0.0020 | 0.0009 | 0.0007 | 341 |
| PSM | DAEEFGLL | 422 | 8 | | | | | | 342 |
| PSM | DAEEFGLLGST | 422 | 11 | | | | | | 343 |
| PSM | DALFDIESKV | 710 | 10 | 0.0004 | | | | | 344 |
| PSM | DAQKLLEKM | 301 | 9 | | | | | | 345 |
| PSA | DAVKVMDL | 130 | 8 | −0.0001 | 0.0003 | −0.0001 | −0.0001 | 0.0001 | 346 |
| PSA | DAVKVMDLPT | 130 | 10 | 0.0001 | | | | | 347 |
| PSM | DIESKVDPSKA | 714 | 11 | | | | | | 348 |
| PSM | DIVPPFSA | 156 | 8 | | | | | | 349 |
| PAP | DLFGIWSKV | 201 | 9 | 0.0002 | | | | | 350 |
| PSA | DLHVISNDV | 171 | 9 | 0.0003 | | | | | 351 |
| PSA | DLHVISNDVCA | 171 | 11 | 0.0001 | | | | | 352 |
| Kallikrein | DLMLLRLSEPA | 120 | 11 | 0.0022 | | | | | 353 |
| PSA | DLMLLRLSEPA | 116 | 11 | 0.0022 | | | | | 354 |
| PSA | DLPTQEPA | 136 | 8 | 0.0001 | | | | | 355 |
| PSA | DLPTQEPAL | 136 | 9 | 0.0003 | | | | | 356 |
| PSA | DLPTQEPALGT | 136 | 11 | 0.0041 | 0.0180 | 0.0100 | 0.0001 | 0.0009 | 357 |
| Kallikrein | DLVLSIAL | 3 | 8 | 0.0001 | −0.0002 | −0.0001 | −0.0001 | 0.0006 | 358 |
| Kallikrein | DLVLSIALSV | 3 | 10 | 0.0010 | 0.0180 | 0.0052 | 0.0230 | 0.0051 | 359 |
| PSM | DLVYVNYA | 173 | 8 | | | | | | 360 |
| PSM | DLVYVNYART | 173 | 10 | 0.0004 | | | | | 361 |
| Kallikrein | DMCARAYSEKV | 182 | 11 | 0.0001 | 0.0018 | 0.0130 | 0.0001 | 0.0170 | 362 |
| PSM | DMKINCSGKI | 191 | 10 | 0.0001 | | | | | 363 |
| PSM | DMKINCSGKIV | 191 | 11 | | | | | | 364 |
| PSA | DMSLLKNRFL | 98 | 10 | 0.0001 | | | | | 365 |
| PSM | DQLMFLERA | 666 | 9 | | | | | | 366 |
| PSM | DQLMFLERAFI | 666 | 11 | | | | | | 367 |
| Kallikrein | DTCGGDSGGPL | 207 | 11 | 0.0001 | −0.0001 | 0.0005 | −0.0001 | 0.0005 | 368 |
| PAP | DTFPTDPI | 51 | 8 | | | | | | 369 |
| Kallikrein | DTGQRVPV | 85 | 8 | −0.0001 | 0.0001 | −0.0001 | −0.0001 | 0.0002 | 370 |
| PSA | DTGQVFQV | 81 | 8 | −0.0001 | −0.0001 | −0.0001 | −0.0001 | 0.0016 | 371 |
| PAP | DTMTKLREL | 230 | 9 | 0.0002 | | | | | 372 |
| PAP | DTTVSGLQM | 290 | 9 | | | | | | 373 |
| PAP | DTTVSGLQMA | 290 | 10 | | | | | | 374 |
| PAP | DTTVSGLQMAL | 290 | 11 | | | | | | 375 |
| PSA | DVCAQVHPQKV | 178 | 11 | 0.0001 | | | | | 376 |
| PAP | DVDRTLMSA | 108 | 9 | | | | | | 377 |
| PAP | DVDRTLMSAM | 108 | 10 | | | | | | 378 |
| PAP | DVDRTLMSAMT | 108 | 11 | | | | | | 379 |
| PSM | DVLLSYPNKT | 114 | 10 | | | | | | 380 |
| Kallikrein | DVVKVLGL | 134 | 8 | −0.0001 | −0.0001 | −0.0001 | −0.0001 | 0.0024 | 381 |
| Kallikrein | DVVKVLGLPT | 134 | 10 | 0.0012 | 0.0230 | 0.0460 | 0.0004 | 0.0017 | 382 |
| PAP | DVYNGLLPPYA | 301 | 11 | | | | | | 383 |
| PSM | EATNITPKHNM | 48 | 11 | | | | | | 384 |
| PSM | EAVGLPSI | 285 | 8 | | | | | | 385 |
| PSM | EAVGLPSIPV | 285 | 10 | 0.0002 | | | | | 386 |
| PSM | EIASKFSERL | 641 | 10 | 0.0001 | | | | | 387 |
| PAP | EILNHMKRA | 266 | 9 | | | | | | 388 |
| PAP | EILNHMKRAT | 266 | 10 | | | | | | 389 |
| PSM | EIVRSFGT | 397 | 8 | | | | | | 390 |
| PSM | EIVRSFGTL | 397 | 9 | 0.0002 | | | | | 391 |
| PSM | ELAHYDVL | 109 | 8 | | | | | | 392 |
| PSM | ELAHYDVLL | 109 | 9 | 0.0028 | | | | | 393 |
| PSM | ELANSIVL | 586 | 8 | | | | | | 394 |
| PSM | ELKAENIKKFL | 64 | 11 | | | | | | 395 |
| PAP | ELKFVTLV | 34 | 8 | | | | | | 396 |
| PAP | ELSELSLL | 237 | 8 | | | | | | 397 |
| PAP | ELSELSLLSL | 237 | 10 | 0.0008 | | | | | 398 |
| PAP | ELSLLSLYGI | 240 | 10 | 0.0002 | | | | | 399 |
| PSA | ELTDAVKV | 127 | 8 | 0.0001 | | | | | 400 |
| PSA | ELTDAVKVM | 127 | 9 | 0.0001 | | | | | 401 |
| PSA | ELTDAVKVMDL | 127 | 11 | 0.0001 | | | | | 402 |
| PSM | ELVEKFYDPM | 560 | 10 | 0.0001 | | | | | 403 |
| PAP | ELYFEKGEYFV | 317 | 11 | | | | | | 404 |
| PAP | EMYYRNET | 328 | 8 | | | | | | 405 |
| PAP | EQHYELGEYI | 76 | 10 | | | | | | 406 |
| PSM | EQNFQLAKQI | 87 | 10 | | | | | | 407 |
| PAP | EQVYIRST | 100 | 8 | | | | | | 408 |
| PAP | EQVYIRSTDV | 100 | 10 | | | | | | 409 |
| PSM | ETDSAVAT | 7 | 8 | | | | | | 410 |
| PSM | ETDSAVATA | 7 | 9 | | | | | | 411 |
| PSM | ETNKFSGYPL | 542 | 10 | 0.0002 | | | | | 412 |
| PAP | ETQHEPYPL | 334 | 9 | 0.0002 | | | | | 413 |
| PAP | ETQHEPYPLM | 334 | 10 | | | | | | 414 |
| PAP | ETQHEPYPLML | 334 | 11 | | | | | | 415 |
| PSM | EVFFQRLG | 522 | 9 | 0.0002 | | | | | 416 |
| PSM | EVFFQRLGIA | 522 | 10 | | | | | | 417 |
| PSM | EVKRQIYV | 727 | 8 | | | | | | 418 |
| PSM | EVKRQIYVA | 727 | 9 | | | | | | 419 |
| PSM | EVKRQIYVAA | 727 | 10 | | | | | | 420 |
| PSM | EVTRIYNV | 351 | 8 | | | | | | 421 |
| PSM | EVTRIYNVI | 351 | 9 | 0.0002 | | | | | 422 |
| PSM | EVTRIYNVIGT | 351 | 11 | | | | | | 423 |
| PAP | FAELVGPV | 356 | 8 | | | | | | 424 |
| PAP | FAELVGPVI | 356 | 9 | 0.0002 | | | | | 425 |
| PSM | FASWDAEEFGL | 418 | 11 | | | | | | 426 |
| PAP | FIATLGKL | 187 | 8 | | | | | | 427 |
| PAP | FIATLGKLSGL | 187 | 11 | | | | | | 428 |
| PSM | FIKSSNEA | 42 | 8 | | | | | | 429 |
| PSM | FIKSSNEAT | 42 | 9 | | | | | | 430 |
| PSM | FIKSSNEATNI | 42 | 11 | | | | | | 431 |
| PSM | FLDELKAENI | 61 | 10 | 0.0160 | | | | | 432 |
| PSM | FLERAFIDPL | 670 | 10 | 0.0014 | | | | | 433 |
| PAP | FLFLLFFWL | 18 | 9 | 0.0011 | | | | | 434 |
| PAP | FLLFFWLDRSV | 20 | 11 | | | | | | 435 |
| PSM | FLLGFLFGWFI | 33 | 11 | | | | | | 436 |
| PAP | FLNESYKHEQV | 92 | 11 | | | | | | 437 |
| Kallikrein | FLRPRSLQCV | 165 | 10 | 0.0410 | 0.0940 | 1.1000 | 0.0068 | 0.0036 | 438 |
| PSA | FLTLSVTWI | 3 | 9 | 0.0150 | | | | | 439 |
| PSA | FLTLSVTWIGA | 3 | 11 | 0.0160 | | | | | 440 |
| PSA | FLTPKKLQCV | 161 | 10 | 0.0310 | | | | | 441 |
| PSM | FLYNFTQI | 73 | 8 | | | | | | 442 |
| PSM | FLYNFTQIPHL | 73 | 11 | | | | | | 443 |
| Kallkrein | FMLCAGLWT | 195 | 9 | 0.0220 | 0.0019 | 0.0160 | 0.0170 | 0.0006 | 444 |
| PSA | FMLGAGRWT | 191 | 9 | 0.0059 | | | | | 445 |
| PAP | FQELESET | 164 | 8 | | | | | | 446 |
| PAP | FQELESETL | 164 | 9 | | | | | | 447 |
| PSM | FQRLGIASGRA | 525 | 11 | | | | | | 448 |
| PSA | FQVSHSFPHPL | 86 | 11 | | | | | | 449 |
| PSM | FTGNFSTQKV | 333 | 10 | 0.0001 | | | | | 450 |
| PAP | FTLPSWAT | 221 | 8 | | | | | | 451 |
| PAP | FTLPSWATEDT | 221 | 11 | | | | | | 452 |
| PSM | FTQIPHLA | 77 | 8 | | | | | | 453 |
| PSM | FTQIPHLAGT | 77 | 10 | | | | | | 454 |
| PSM | FTVQAAAET | 737 | 9 | | | | | | 455 |
| PSM | FTVQAAAETL | 737 | 10 | 0.0001 | | | | | 456 |
| PAP | FVEMYYRNET | 326 | 10 | | | | | | 457 |
| PSA | GAAPLILSRI | 12 | 10 | 0.0005 | | | | | 458 |
| PSA | GAAPLILSRIV | 12 | 11 | 0.1700 | 0.0220 | 0.0110 | 0.0006 | 0.0017 | 459 |
| PSM | GAAVVHEI | 391 | 8 | | | | | | 460 |
| PSM | GAAVVHEIV | 391 | 9 | 0.0002 | | | | | 461 |
| PSM | GALVLAGGFFL | 24 | 11 | | | | | | 462 |
| PSM | GAVEPDRYV | 364 | 9 | 0.0001 | | | | | 463 |
| PSM | GAVEPDRYVI | 364 | 10 | 0.0002 | | | | | 464 |
| PSM | GAVEPDRYVIL | 364 | 11 | | | | | | 465 |
| Kallikrein | GAVPLIQSRI | 16 | 10 | 0.0017 | 0.0520 | 0.0380 | 0.0041 | 0.0057 | 466 |
| Kallikrein | GAVPLIQSRIV | 16 | 11 | 0.0001 | 0.0004 | 0.0004 | 0.0003 | 0.0003 | 467 |
| PSM | GIAEAVGL | 282 | 8 | | | | | | 468 |
| PSM | GIAEAVGLPSI | 282 | 11 | | | | | | 469 |
| PSM | GIASGRARYT | 529 | 10 | | | | | | 470 |
| PSM | GIDPQSGA | 385 | 8 | | | | | | 471 |
| PSM | GIDPQSGAA | 385 | 9 | | | | | | 472 |
| PSM | GIDPQSGAAV | 385 | 10 | 0.0002 | | | | | 473 |
| PSM | GIDPQSGAAVV | 385 | 11 | | | | | | 474 |
| PAP | GIHKQKEKSRL | 248 | 11 | | | | | | 475 |
| Kallikrein | GITSWGPEPCA | 225 | 11 | 0.0009 | 0.0014 | 0.0230 | 0.0001 | 0.0004 | 476 |
| PSA | GITSWGSEPCA | 221 | 11 | 0.0001 | | | | | 477 |
| PAP | GIWSKVYDPL | 204 | 10 | 0.0002 | | | | | 478 |
| PSM | GIYDALFDI | 707 | 9 | 0.0210 | | | | | 479 |
| PSM | GLDSVELA | 104 | 8 | | | | | | 480 |
| PAP | GLHGQDLFGI | 196 | 10 | 0.0340 | | | | | 481 |
| PSM | GLLGSTEWA | 427 | 9 | 0.0079 | | | | | 482 |
| PAP | GLLPPYASCHL | 305 | 11 | | | | | | 483 |
| PSM | GLPDRPFYRHV | 680 | 11 | | | | | | 484 |
| PSM | GLPSIPVHPI | 288 | 10 | 0.0340 | 1.6000 | 4.7000 | 0.0015 | 0.0260 | 485 |
| Kallikrein | GLPTQEPA | 140 | 8 | −0.0001 | 0.0003 | −0.0001 | −0.0001 | −0.0001 | 486 |
| Kallikrein | GLPTQEPAL | 140 | 9 | 0.0002 | 0.0092 | 0.0013 | 0.0007 | −0.0002 | 487 |
| Kallikrein | GLPTQEPALGT | 140 | 11 | 0.0003 | 0.0200 | 0.0450 | 0.0006 | 0.0020 | 488 |
| PAP | GLQMALDV | 295 | 8 | | | | | | 489 |
| Kallikrein | GLWTGGKDT | 200 | 9 | 0.0002 | 0.0007 | 0.0015 | −0.0001 | −0.0002 | 490 |
| PAP | GMEQHYEL | 74 | 8 | | | | | | 491 |
| PSM | GMPEGDLV | 168 | 8 | | | | | | 492 |
| PSM | GMPEGDLVYV | 168 | 10 | 0.0910 | 1.4000 | 1.4000 | 0.0230 | 0.0013 | 493 |
| PSM | GMPRISKL | 508 | 8 | | | | | | 494 |
| PSM | GMVFELANSI | 582 | 10 | 0.0024 | | | | | 495 |
| PSM | GMVFELANSIV | 582 | 11 | | | | | | 496 |
| PAP | GQDLFGIWSKV | 199 | 11 | | | | | | 497 |
| PAP | GQLTQLGM | 68 | 8 | | | | | | 498 |
| PSM | GTEQNFQL | 85 | 8 | | | | | | 499 |
| PSM | GTEQNFQLA | 85 | 9 | | | | | | 500 |
| PSM | GVAYINADSSI | 446 | 11 | | | | | | 501 |
| PSM | GVILYSDPA | 224 | 9 | | | | | | 502 |
| PSM | GVKSYPDGWNL | 238 | 11 | | | | | | 503 |
| Kallikrein | GVLVHPQWV | 52 | 9 | 0.0003 | | | | | 504 |
| PSA | GVLVHPQWV | 48 | 9 | 0.0003 | | | | | 505 |
| Kallikrein | GVLVHPQWVL | 52 | 10 | 0.0004 | | | | | 506 |
| PSA | GVLVHPQWVL | 48 | 10 | 0.0004 | | | | | 507 |
| Kallikrein | GVLVHPQWVLT | 52 | 11 | 0.0002 | 0.0005 | 0.0005 | 0.0014 | −0.0001 | 508 |
| PSA | GVLVHPQWVLT | 48 | 11 | 0.0002 | 0.0005 | 0.0005 | 0.0014 | −0.0001 | 509 |
| PAP | GVLVNEIL | 261 | 8 | | | | | | 510 |
| PAP | GVLVNEILNHM | 261 | 11 | | | | | | 511 |
| PSM | GVQRGNIL | 252 | 8 | | | | | | 512 |
| PSM | GVQRGNILNL | 252 | 10 | 0.0001 | | | | | 513 |
| PAP | GVSIWNPI | 128 | 8 | | | | | | 514 |
| PAP | GVSIWNPIL | 128 | 9 | 0.0034 | | | | | 515 |
| PAP | GVSIWNPILL | 128 | 10 | 0.0016 | | | | | 516 |
| PSM | HIHSTNEV | 345 | 8 | | | | | | 517 |
| PSM | HIHSTNEVT | 345 | 9 | | | | | | 518 |
| PSM | HIHSTNEVTRI | 345 | 11 | | | | | | 519 |
| PSM | HLAGTEQNFQL | 82 | 11 | | | | | | 520 |
| Kallikrein | HLLSNDMCA | 177 | 9 | 0.0020 | 0.0049 | 0.0005 | 0.0009 | 0.0003 | 521 |
| Kallikrein | HLLSNDMCARA | 177 | 11 | 0.0290 | 0.0520 | 0.1100 | 0.0088 | 0.0004 | 522 |
| PSM | HLTVAQVRGGM | 573 | 11 | | | | | | 523 |
| PAP | HMKRATQI | 270 | 8 | | | | | | 524 |
| PAP | HQGTEDST | 378 | 8 | | | | | | 525 |
| PAP | HTVPLSEDQL | 144 | 10 | 0.0002 | | | | | 526 |
| PAP | HTVPLSEDQLL | 144 | 11 | | | | | | 527 |
| PSA | HVISNDVCA | 173 | 9 | 0.0001 | | | | | 528 |
| PSA | HVISNDVCAQV | 173 | 11 | 0.0024 | | | | | 529 |
| PSM | IAEAVGLPSI | 283 | 10 | 0.0001 | | | | | 530 |
| Kallikrein | IALSVGCT | 8 | 8 | 0.0001 | −0.0002 | −0.0001 | −0.0001 | 0.0003 | 531 |
| Kallikrein | IALSVGCTGA | 8 | 10 | 0.0013 | 0.0500 | 0.0180 | 0.0180 | 0.0005 | 532 |
| Kallikrein | IALSVGCTGAV | 8 | 11 | 0.0009 | 0.0032 | 0.0270 | 0.0100 | 0.0061 | 533 |
| PSM | IASGRARYT | 530 | 9 | | | | | | 534 |
| PSM | IASKFSERL | 642 | 9 | 0.0001 | | | | | 535 |
| PAP | IATLGKLSGL | 188 | 10 | 0.0002 | | | | | 536 |
| PSM | IINEDGNEI | 130 | 9 | 0.0002 | | | | | 537 |
| PSM | ILFASWDA | 416 | 8 | | | | | | 538 |
| PSM | ILGGHRDSWV | 373 | 10 | 0.0003 | | | | | 539 |
| PSA | ILLGRHSL | 69 | 8 | 0.0010 | | | | | 540 |
| PAP | ILLWQPIPV | 135 | 9 | 1.3000 | | | | | 541 |
| PAP | ILLWQPIPVHT | 135 | 11 | | | | | | 542 |
| PAP | ILNHMKRA | 267 | 8 | | | | | | 543 |
| PAP | ILNHMKRAT | 267 | 9 | 0.0001 | | | | | 544 |
| PAP | ILNHMKRATQI | 267 | 11 | | | | | | 545 |
| PSM | ILNLNGAGDPL | 258 | 11 | | | | | | 546 |
| PSM | ILYSDPADYFA | 226 | 11 | | | | | | 547 |
| PAP | IMYSAHDT | 284 | 8 | | | | | | 548 |
| PAP | IMYSAHDTT | 284 | 9 | 0.0019 | | | | | 549 |
| PAP | IMYSAHDTTV | 284 | 10 | 0.0610 | | | | | 550 |
| PSM | IQSQWKEFGL | 96 | 10 | | | | | | 551 |
| Kallikrein | ITDVVKVL | 132 | 8 | 0.0001 | 0.0010 | 0.0001 | −0.0001 | 0.0002 | 552 |
| Kallikrein | ITDVVKVLGL | 132 | 10 | 0.0003 | 0.0084 | 0.0088 | 0.0004 | 0.0005 | 553 |
| PSM | ITPKHNMKA | 52 | 9 | | | | | | 554 |
| PSM | ITPKHNMKAFL | 52 | 11 | | | | | | 555 |
| Kallikrein | ITSWGPEPCA | 226 | 10 | 0.0003 | 0.0100 | 0.0031 | 0.0005 | 0.0002 | 556 |
| Kallkrein | ITSWGPEPCAL | 226 | 11 | 0.0003 | 0.0150 | 0.0007 | 0.0013 | 0.0350 | 557 |
| PSA | ITSWGSEPCA | 222 | 10 | 0.0003 | 0.0036 | 0.0030 | 0.0001 | 0.0003 | 558 |
| PSA | ITSWGSEPCAL | 222 | 11 | 0.0010 | 0.0120 | 0.0096 | 0.0001 | 0.0003 | 559 |
| PSM | IVIARYGKV | 200 | 9 | 0.0001 | | | | | 560 |
| PSM | IVLPFDCRDYA | 591 | 11 | | | | | | 561 |
| PSM | IVLRMMNDQL | 659 | 10 | 0.0004 | | | | | 562 |
| PSM | IVLRMMNDQLM | 659 | 11 | | | | | | 563 |
| PSM | IVRSFGTL | 398 | 8 | | | | | | 564 |
| PSM | KAENIKKFL | 66 | 9 | 0.0002 | | | | | 565 |
| PSM | KAFLDELKA | 59 | 9 | | | | | | 566 |
| PSM | KAWGEVKRQI | 723 | 10 | 0.0001 | | | | | 567 |
| PSM | KINCSGKI | 193 | 8 | | | | | | 568 |
| PSM | KINCSGKIV | 193 | 9 | 0.0002 | | | | | 569 |
| PSM | KKINCSGKIVI | 193 | 10 | 0.0001 | | | | | 570 |
| PSM | KINCSGKIVIA | 193 | 11 | | | | | | 571 |
| Kallikrein | KITDVVKV | 131 | 8 | 0.0004 | 0.0002 | 0.0017 | 0.0002 | −0.0001 | 572 |
| Kallikrein | KITDVVKVL | 131 | 9 | 0.0047 | 0.0500 | 0.0420 | 0.0021 | 0.0002 | 573 |
| Kallikrein | KITDVVKVLGL | 131 | 11 | 0.0002 | 0.0053 | 0.1700 | 0.0011 | 0.0006 | 574 |
| PSM | KIVIARYGKV | 199 | 10 | 0.0002 | | | | | 575 |
| PSM | KLERDMKI | 187 | 8 | | | | | | 576 |
| PSM | KLGSGNDFEV | 514 | 10 | 0.0140 | | | | | 577 |
| PAP | KLIMYSAHDT | 282 | 10 | 0.0002 | | | | | 578 |
| PAP | KLIMYSAHDTT | 282 | 11 | | | | | | 579 |
| PSM | KLLEKMGGSA | 304 | 10 | 0.0003 | | | | | 580 |
| PSA | KLQCVDLHV | 166 | 9 | 0.0190 | | | | | 581 |
| PSA | KLQCVDLHVI | 166 | 10 | 0.0370 | | | | | 582 |
| PAP | KLRELSEL | 234 | 8 | | | | | | 583 |
| PAP | KLRELSELSL | 234 | 10 | 0.0040 | | | | | 584 |
| PAP | KLRELSELSLL | 234 | 11 | | | | | | 585 |
| PAP | KLSGLHGQDL | 193 | 10 | 0.0026 | | | | | 586 |
| PSM | KMHIHSTNEV | 343 | 10 | 0.0042 | | | | | 587 |
| PSM | KMHIHSTNEVT | 343 | 11 | | | | | | 588 |
| PAP | KQKEKSRL | 251 | 8 | | | | | | 589 |
| PSM | KTHPNYISI | 122 | 9 | 0.0002 | | | | | 590 |
| PSM | KTHPNYISII | 122 | 10 | 0.0001 | | | | | 591 |
| PSM | KTYSVSFDSL | 623 | 10 | 0.0002 | | | | | 592 |
| PSM | KVDPSKAWGEV | 718 | 11 | | | | | | 593 |
| PSM | KVFRGNKV | 207 | 8 | | | | | | 594 |
| PSM | KVFRGNKVKNA | 207 | 11 | | | | | | 595 |
| PSM | KVKMHIHST | 341 | 9 | | | | | | 596 |
| PSM | KVKNAQLA | 213 | 8 | | | | | | 597 |
| PSM | KVKNAQLAGA | 213 | 10 | | | | | | 598 |
| Kallikrein | KVLGLPTQEPA | 137 | 11 | 0.0001 | 0.0004 | 0.0009 | 0.0012 | 0.0005 | 599 |
| PSA | KVMDLPTQEPA | 133 | 11 | 0.0014 | | | | | 600 |
| PSM | KVPYNVGPGFT | 324 | 11 | | | | | | 601 |
| Kallikrein | KVTEFMLCA | 191 | 9 | 0.0035 | 0.0092 | 0.1900 | 0.1600 | 0.0004 | 602 |
| Kallikrein | KVTEFMLCAGL | 191 | 11 | 0.0010 | 0.0280 | 0.0280 | 0.0160 | 0.0036 | 603 |
| PSA | KVTKFMLCA | 187 | 9 | 0.0020 | | | | | 604 |
| Kallikrein | KVVHYRKWI | 245 | 9 | 0.0001 | | | | | 605 |
| PSA | KVVHYRKWI | 241 | 9 | 0.0001 | | | | | 606 |
| PAP | KVYDPLYGESV | 208 | 11 | | | | | | 607 |
| PAP | LAALFPPEGV | 120 | 10 | 0.0017 | | | | | 608 |
| PSM | LAGAKGVI | 219 | 8 | | | | | | 609 |
| PSM | LAGAKGVIL | 219 | 9 | 0.0002 | | | | | 610 |
| PSM | LAGGFFLL | 28 | 8 | | | | | | 611 |
| PSM | LAGGFFLLGFL | 28 | 11 | | | | | | 612 |
| PSM | LAGTEQNFQL | 83 | 10 | 0.0001 | | | | | 613 |
| PSM | LAGTEQNFQLA | 83 | 11 | | | | | | 614 |
| PSM | LAHYDVLL | 110 | 8 | | | | | | 615 |
| PAP | LAKELKFV | 31 | 8 | | | | | | 616 |
| PAP | LAKELKFVT | 31 | 9 | | | | | | 617 |
| PAP | LAKELKFVTL | 31 | 10 | 0.0002 | | | | | 618 |
| PAP | LAKELKFVTLV | 31 | 11 | | | | | | 619 |
| PAP | LARAASLSL | 8 | 9 | 0.0002 | | | | | 620 |
| PAP | LIMYSAHDT | 283 | 9 | | | | | | 621 |
| PAP | LIMYSAHDTT | 283 | 10 | | | | | | 622 |
| PAP | LIMYSAHDTTV | 283 | 11 | | | | | | 623 |
| PAP | LLARAASL | 7 | 8 | | | | | | 624 |
| PAP | LLARAASLSL | 7 | 10 | 0.0061 | | | | | 625 |
| PSM | LLEKMGGSA | 305 | 9 | 0.0001 | | | | | 626 |
| PAP | LLFFWLDRSV | 21 | 10 | 0.6000 | | | | | 627 |
| PAP | LLFFWLDRSVL | 21 | 11 | | | | | | 628 |
| PSM | LLGFLFGWFI | 34 | 10 | 0.0058 | | | | | 629 |
| PSM | LLGSTEWA | 428 | 8 | | | | | | 630 |
| PSM | LLHETDSA | 4 | 8 | | | | | | 631 |
| PSM | LLHETDSAV | 4 | 9 | 0.0180 | | | | | 632 |
| PSM | LLHETDSAVA | 4 | 10 | 0.0006 | | | | | 633 |
| PSM | LLHETDSAVAT | 4 | 11 | | | | | | 634 |
| PAP | LLLARAASL | 6 | 9 | 0.0120 | | | | | 635 |
| PAP | LLLARAASLSL | 6 | 11 | | | | | | 636 |
| PAP | LLPPYASCHL | 306 | 10 | 0.0017 | | | | | 637 |
| PAP | LLPPYASCHLT | 306 | 11 | | | | | | 638 |
| PSM | LLQERGVA | 441 | 8 | | | | | | 639 |
| PSM | LLQERGVAYI | 441 | 10 | 0.0280 | 0.7500 | 1.5000 | 0.0043 | 0.0006 | 640 |
| Kallikrein | LLRLSEPA | 123 | 8 | 0.0001 | | | | | 641 |
| PSA | LLRLSEPA | 119 | 8 | 0.0001 | | | | | 642 |
| PSA | LLRLSEPAEL | 119 | 10 | 0.0001 | | | | | 643 |
| PSA | LLRLSEPAELT | 119 | 11 | 0.0023 | 0.0140 | 0.0150 | 0.0002 | 0.0010 | 644 |
| Kallikrein | LLRLSEPAKI | 123 | 10 | 0.0030 | 0.0290 | 0.9200 | 0.0010 | 0.0008 | 645 |
| Kallikrein | LLRLSEPAKIT | 123 | 11 | 0.0002 | 0.0007 | 0.0180 | −0.0001 | −0.0001 | 646 |
| Kallikrein | LLSNDMCA | 178 | 8 | 0.0003 | 0.0073 | 0.0003 | 0.0021 | −0.0001 | 647 |
| Kallikrein | LLSNDMCARA | 178 | 10 | 0.0030 | 0.0800 | 0.0280 | 0.0020 | 0.0042 | 648 |
| PSM | LLSYPNKT | 116 | 8 | | | | | | 649 |
| PAP | LLWQPIPV | 136 | 8 | | | | | | 650 |
| PAP | LLWQPIPVHT | 136 | 10 | 0.0074 | | | | | 651 |
| PAP | LLWQPIPVHTV | 136 | 11 | | | | | | 652 |
| PSM | LMFLERAFI | 668 | 9 | 0.0110 | | | | | 653 |
| Kallikrein | LMLLRLSEPA | 121 | 10 | 0.0018 | | | | | 654 |
| PSA | LMLLRLSEPA | 117 | 10 | 0.0018 | | | | | 655 |
| PAP | LMSAMTNL | 113 | 8 | | | | | | 656 |
| PAP | LMSAMTNLA | 113 | 9 | 0.0071 | | | | | 657 |
| PAP | LMSAMTNLAA | 113 | 10 | 0.0037 | | | | | 658 |
| PAP | LMSAMTNLAAL | 113 | 11 | | | | | | 659 |
| PSM | LMYSLVHNL | 469 | 9 | 0.0780 | 11.0000 | 4.8000 | 0.0340 | 0.0250 | 660 |
| PSM | LMYSLVHNLT | 469 | 10 | 0.0046 | | | | | 661 |
| PSA | LQCVDLHV | 167 | 8 | | | | | | 662 |
| PSA | LQCVDLHVI | 167 | 9 | | | | | | 663 |
| Kallikrein | LQCVSLHL | 171 | 8 | | | | | | 664 |
| Kallikrein | LQCVSLHLL | 171 | 9 | | | | | | 665 |
| PSM | LQDFDKSNPI | 650 | 10 | | | | | | 666 |
| PSM | LQDFDKSNPIV | 650 | 11 | | | | | | 667 |
| PSM | LQERGVAYI | 442 | 9 | | | | | | 668 |
| PSM | LQERGVAYINA | 442 | 11 | | | | | | 669 |
| PAP | LQGGVLVNEI | 258 | 10 | | | | | | 670 |
| PAP | LQGGVLVNEIL | 258 | 11 | | | | | | 671 |
| PAP | LQMALDVYNGL | 296 | 11 | | | | | | 672 |
| PSA | LTDAVKVM | 128 | 8 | 0.0001 | −0.0001 | 0.0002 | −0.0001 | 0.0001 | 673 |
| PSA | LTDAVKVMDL | 128 | 10 | 0.0002 | | | | | 674 |
| PSA | LTLSVTWI | 4 | 8 | 0.0003 | −0.0001 | 0.0006 | 0.0007 | 0.0001 | 675 |
| PSA | LTLSVTWIGA | 4 | 10 | 0.0018 | 0.0450 | 0.0820 | 0.0110 | 0.0910 | 676 |
| PSA | LTLSVTWIGAA | 4 | 11 | 0.0008 | 0.0014 | 0.0370 | 0.0025 | 0.0062 | 677 |
| PSM | LTPGYPANEYA | 268 | 11 | | | | | | 678 |
| PSA | LTPKKLQCV | 162 | 9 | 0.0003 | | | | | 679 |
| PSA | LTPKKLQCVDL | 162 | 11 | 0.0007 | 0.0087 | 0.0074 | 0.0004 | 0.0021 | 680 |
| PSM | LTVAQVRGGM | 574 | 10 | | | | | | 681 |
| PSM | LTVAQVRGGMV | 574 | 11 | | | | | | 682 |
| PSA | LVASRGRA | 37 | 8 | 0.0001 | | | | | 683 |
| PSA | LVASRGRAV | 37 | 9 | 0.0003 | | | | | 684 |
| Kallikrein | LVCNGVLQGG | 217 | 10 | 0.0004 | | | | | 685 |
| PSA | LVCNGVLQGI | 213 | 10 | 0.0004 | | | | | 686 |
| Kallikrein | LVCNGVLQGIT | 217 | 11 | 0.0007 | 0.0034 | 0.0033 | 0.0049 | 0.0041 | 687 |
| PSA | LVCNGVLQGIT | 213 | 11 | 0.0007 | 0.0034 | 0.0033 | 0.0049 | 0.0041 | 688 |
| PSM | LVEKFYDPM | 561 | 9 | | | | | | 689 |
| PAP | LVFRHGDRSPI | 40 | 11 | | | | | | 690 |
| PSM | LVHNLTKEL | 473 | 9 | 0.0001 | | | | | 691 |
| Kallikrein | LVHPQWVL | 54 | 8 | 0.0001 | | | | | 692 |
| PSA | LVHPQWVL | 50 | 8 | 0.0001 | | | | | 693 |
| Kallikrein | LVHPQWVLT | 54 | 9 | 0.0001 | | | | | 694 |
| PSA | LVHPQWVLT | 50 | 9 | 0.0001 | | | | | 695 |
| Kallikrein | LVHPQWVLTA | 54 | 10 | 0.0001 | | | | | 696 |
| PSA | LVHPQWVLTA | 50 | 10 | 0.0001 | | | | | 697 |
| Kallikrein | LVHPQWVLTAA | 54 | 11 | 0.0001 | | | | | 698 |
| PSA | LVHPQWVLTAA | 50 | 11 | 0.0001 | | | | | 699 |
| PSM | LVLAGGFFL | 26 | 9 | 0.0280 | 0.0030 | 0.0004 | 0.1100 | 0.0003 | 700 |
| PSM | LVLAGGFFLL | 26 | 10 | 0.0021 | | | | | 701 |
| Kallikrein | LVLSTALSV | 4 | 9 | 0.0020 | 0.0027 | 0.0085 | 0.0190 | 0.0002 | 702 |
| PAP | LVNEILNHM | 263 | 9 | | | | | | 703 |
| PSM | LVYVNYART | 174 | 9 | | | | | | 704 |
| PAP | MALDVYNGL | 298 | 9 | 0.0037 | | | | | 705 |
| PAP | MALDVYNGLL | 298 | 10 | 0.0010 | | | | | 706 |
| Kallikrein | MLCAGLWT | 196 | 8 | 0.0014 | 0.0020 | 0.0018 | 0.0001 | 0.0002 | 707 |
| PSA | MLCAGRWT | 192 | 8 | 0.0006 | 0.0012 | 0.0033 | −0.0001 | 0.0001 | 708 |
| Kallikrein | MLLRLSEPA | 122 | 9 | 0.0610 | | | | | 709 |
| PSA | MLLRLSEPA | 118 | 9 | 0.0610 | | | | | 710 |
| PSA | MLLRLSEPAEL | 118 | 11 | 0.1400 | | | | | 711 |
| Kallikrein | MLLRLSEPAKI | 122 | 11 | 0.0044 | 0.0072 | 0.2100 | 0.0019 | 0.0007 | 712 |
| PAP | MLPGCSPSCPL | 343 | 11 | | | | | | 713 |
| PSM | MMNDQLMFL | 663 | 9 | 0.4400 | 5.7000 | 5.8000 | 0.4900 | 0.0410 | 714 |
| PAP | MTKLRELSEL | 232 | 10 | 0.0002 | | | | | 715 |
| PAP | MTTNSHQGT | 373 | 9 | | | | | | 716 |
| PSM | MVFELANSI | 583 | 9 | 0.0170 | | | | | 717 |
| PSM | MVFELANSIV | 583 | 10 | 0.0140 | | | | | 718 |
| PSM | MVFELANSIVL | 583 | 11 | | | | | | 719 |
| PSM | NADSSIEGNYT | 451 | 11 | | | | | | 720 |
| PSM | NAQLAGAKGV | 216 | 10 | 0.0002 | | | | | 721 |
| PSM | NAQLAGAKGVI | 216 | 11 | | | | | | 722 |
| PSM | NIKKFLYNFT | 69 | 10 | | | | | | 723 |
| PSM | NILNLNGA | 257 | 8 | | | | | | 724 |
| PSM | NITPKHNM | 51 | 8 | | | | | | 725 |
| PSM | NITPKHNMKA | 51 | 10 | | | | | | 726 |
| PAP | NLAALFPPEGV | 119 | 11 | | | | | | 727 |
| Kallikrein | NLFEPEDT | 79 | 8 | 0.0002 | 0.0035 | 0.0004 | −0.0001 | 0.0004 | 728 |
| PSM | NLLHETDSA | 3 | 9 | 0.0001 | | | | | 729 |
| PSM | NLLHETDSAV | 3 | 10 | 0.0027 | | | | | 730 |
| PSM | NLLHETDSAVA | 3 | 11 | | | | | | 731 |
| PSM | NLNGAGDPL | 260 | 9 | 0.0007 | | | | | 732 |
| PSM | NLNGAGDPLT | 260 | 10 | 0.0002 | | | | | 733 |
| PSM | NMKAFLDEL | 57 | 9 | 0.0026 | | | | | 734 |
| PSM | NMKAFLDELKA | 57 | 11 | | | | | | 735 |
| Kallikrein | NMSLLKHQSL | 102 | 10 | 0.0043 | 0.0260 | 0.0400 | 0.0058 | 0.0020 | 736 |
| PSM | NVIGTLRGA | 357 | 9 | | | | | | 737 |
| PSM | NVIGTLRGAV | 357 | 10 | 0.0001 | | | | | 738 |
| PSM | NVSDIVPPFSA | 153 | 11 | | | | | | 739 |
| PSM | PADYFAPGV | 231 | 9 | 0.0001 | | | | | 740 |
| PSA | PAELTDAV | 125 | 8 | −0.0001 | −0.0001 | −0.0001 | −0.0001 | −0.0001 | 741 |
| PSA | PAELTDAVKV | 125 | 10 | 0.0002 | | | | | 742 |
| PSA | PAELTDAVKVM | 125 | 11 | 0.0003 | 0.0028 | 0.0008 | −0.0001 | −0.0001 | 743 |
| Kallikrein | PAKITDVV | 129 | 8 | 0.0001 | 0.0003 | −0.0001 | −0.0001 | −0.0001 | 744 |
| Kallikrein | PAKITDVVKV | 129 | 10 | 0.0011 | 0.0100 | 0.0320 | 0.0006 | 0.0002 | 745 |
| Kallikrein | PAKITDVVKVL | 129 | 11 | 0.0002 | 0.0006 | 0.0017 | −0.0001 | 0.0001 | 746 |
| Kallikrein | PALGTTCYA | 146 | 9 | 0.0083 | 0.0210 | 0.0270 | 0.0002 | 0.0035 | 747 |
| PSA | PALGTTCYA | 142 | 9 | 0.0083 | 0.0210 | 0.0270 | 0.0002 | 0.0035 | 748 |
| PSM | PANEYAYRRGI | 273 | 11 | | | | | | 749 |
| Kallikrein | PAVYTKVV | 240 | 8 | 0.0001 | −0.0001 | −0.0001 | −0.0001 | −0.0001 | 750 |
| PAP | PIDTFPTDPI | 49 | 10 | 0.0002 | | | | | 751 |
| PSM | PIGYYDAQKL | 296 | 10 | 0.0001 | | | | | 752 |
| PSM | PIGYYDAQKLL | 296 | 11 | | | | | | 753 |
| PAP | PILLWQPI | 134 | 8 | | | | | | 754 |
| PAP | PILLWQPIPV | 134 | 10 | 0.0075 | | | | | 755 |
| PAP | PIPVHTVPL | 140 | 9 | 0.0002 | | | | | 756 |
| PSM | PIVLRMMNDQL | 658 | 11 | | | | | | 757 |
| PAP | PLERFAEL | 352 | 8 | | | | | | 758 |
| PAP | PLERFAELV | 352 | 9 | 0.0001 | | | | | 759 |
| PSA | PLILSRIV | 15 | 8 | 0.0001 | | | | | 760 |
| Kallikrein | PLIQSRIV | 19 | 8 | 0.0001 | 0.0002 | −0.0001 | −0.0001 | −0.0001 | 761 |
| PAP | PLLLARAA | 5 | 8 | | | | | | 762 |
| PAP | PLLLARAASL | 5 | 10 | 0.0004 | | | | | 763 |
| PSM | PLMYSLVHNL | 468 | 10 | 0.0008 | | | | | 764 |
| PSM | PLMYSLVHNLT | 468 | 11 | | | | | | 765 |
| PAP | PLSEDQLL | 147 | 8 | | | | | | 766 |
| PAP | PLSEDQLLYL | 147 | 10 | 0.0006 | | | | | 767 |
| PSM | PLTPGYPA | 267 | 8 | | | | | | 768 |
| Kallikrein | PLVGNGVL | 216 | 8 | 0.0001 | | | | | 769 |
| PSA | PLVGNGVL | 212 | 8 | 0.0001 | | | | | 770 |
| Kallikrein | PLVCNGVLQGI | 216 | 11 | 0.0020 | | | | | 771 |
| PSA | PLVCNGVLQGI | 212 | 11 | 0.0020 | | | | | 772 |
| PAP | PLYCESVHNFT | 212 | 11 | | | | | | 773 |
| PSA | PLYDMSLL | 95 | 8 | 0.0002 | | | | | 774 |
| PSM | PLYHSVYET | 550 | 9 | 0.0002 | | | | | 775 |
| Kallikrein | PLYNMSLL | 99 | 8 | 0.0002 | 0.0008 | 0.0002 | −0.0001 | −0.0001 | 776 |
| PSM | PMFKYHLT | 568 | 8 | | | | | | 777 |
| PSM | PMFKYHLTV | 568 | 9 | 0.0042 | | | | | 778 |
| PSM | PMFKYHLTVA | 568 | 10 | 0.0005 | | | | | 779 |
| PAP | PQDWSTECM | 365 | 9 | | | | | | 780 |
| PAP | PQDWSTECMT | 365 | 10 | | | | | | 781 |
| PAP | PQDWSTECMTT | 365 | 11 | | | | | | 782 |
| PSM | PQEMKTYSV | 619 | 9 | | | | | | 783 |
| PAP | PQGFGQLT | 64 | 8 | | | | | | 784 |
| PAP | PQGFGQLTQL | 64 | 10 | | | | | | 785 |
| PSM | PQGMPEGDL | 166 | 9 | | | | | | 786 |
| PSM | PQGMPEGDLV | 166 | 10 | | | | | | 787 |
| PSA | PQKVTKFM | 185 | 8 | | | | | | 788 |
| PSA | PQKVTKFML | 185 | 9 | | | | | | 789 |
| PSA | PQKVTKFMLCA | 185 | 11 | | | | | | 790 |
| PSM | PQSGAAVV | 388 | 8 | | | | | | 791 |
| PSM | PQSGAAVVHEI | 388 | 11 | | | | | | 792 |
| Kallikrein | PQWVLTAA | 57 | 8 | | | | | | 793 |
| PSA | PQWVLTAA | 53 | 8 | | | | | | 794 |
| PSA | PQWVLTAAHCI | 53 | 11 | | | | | | 795 |
| Kallikrein | PQWVLTAAHCL | 57 | 11 | | | | | | 796 |
| Kallikrein | PTQEPALGT | 142 | 9 | 0.0001 | | | | | 797 |
| PSA | PTQEPALGT | 138 | 9 | 0.0001 | | | | | 798 |
| Kallikrein | PTQEPALGTT | 142 | 10 | 0.0084 | 0.0220 | 0.0520 | 0.0037 | 0.0005 | 799 |
| PSA | PTQEPALGTT | 138 | 10 | 0.0084 | 0.0220 | 0.0520 | 0.0037 | 0.0005 | 800 |
| PSM | PVHPIGYYDA | 293 | 10 | | | | | | 801 |
| PAP | PVIPQDWST | 362 | 9 | | | | | | 802 |
| Kallikrein | PVSHSFPHPL | 91 | 10 | 0.0019 | 0.0099 | 0.0680 | 0.0022 | 0.0011 | 803 |
| PSM | QAAAETLSEV | 740 | 10 | 0.0006 | | | | | 804 |
| PSM | QAAAETLSEVA | 740 | 11 | | | | | | 805 |
| PSM | QIPHLAGT | 79 | 8 | | | | | | 806 |
| PAP | QIPSYKKL | 276 | 8 | | | | | | 807 |
| PAP | QIPSYKKLI | 276 | 9 | 0.0002 | | | | | 808 |
| PAP | QIPSYKKLIM | 276 | 10 | | | | | | 809 |
| PSM | QIQSQWKEFGL | 95 | 11 | | | | | | 810 |
| PSM | QIYVAAFT | 731 | 8 | | | | | | 811 |
| PSM | QIYVAAFTV | 731 | 9 | 0.0026 | | | | | 812 |
| PSM | QIYVAAFTVQA | 731 | 11 | | | | | | 813 |
| PSM | QLAGAKGV | 218 | 8 | | | | | | 814 |
| PSM | QLAGAKGVI | 218 | 9 | 0.0001 | | | | | 815 |
| PSM | QLAGAKGVIL | 218 | 10 | 0.0006 | | | | | 816 |
| PAP | QLGMEQHYEL | 72 | 10 | 0.0003 | | | | | 817 |
| PSM | QLMFLERA | 667 | 8 | | | | | | 818 |
| PSM | QLMFLERAFI | 667 | 10 | 0.0510 | 0.1200 | 0.1100 | 0.0003 | 0.2700 | 819 |
| PAP | QMALDVYNGL | 297 | 10 | 0.0002 | | | | | 820 |
| PAP | QMALDVYNGLL | 297 | 11 | | | | | | 821 |
| Kallikrein | QVAVYSHGWA | 39 | 10 | 0.0004 | 0.0097 | 0.0200 | 0.0005 | 0.0252 | 822 |
| PSA | QVHPQKVT | 182 | 8 | −0.0001 | −0.0001 | 0.0001 | −0.0001 | −0.0001 | 823 |
| PSA | QVHPQKVTKFM | 182 | 11 | 0.0001 | | | | | 824 |
| PSA | QVLVASRGRA | 35 | 10 | 0.0001 | | | | | 825 |
| PSA | QVLVASRGRAV | 35 | 11 | 0.0001 | | | | | 826 |
| PSM | QVRGGMVFEL | 578 | 10 | 0.0001 | | | | | 827 |
| PSM | QVRGGMVFELA | 578 | 11 | | | | | | 828 |
| PSA | QVSHSFPHPL | 87 | 10 | 0.0001 | | | | | 829 |
| Kallikrein | QVWLGRHNL | 72 | 9 | 0.0001 | 0.0021 | 0.0011 | 0.0025 | 0.0510 | 830 |
| PAP | QVYIRSTDV | 101 | 9 | 0.0002 | | | | | 831 |
| PAP | RAAPLLLA | 2 | 8 | | | | | | 832 |
| PAP | RAAPLLLARA | 2 | 10 | | | | | | 833 |
| PAP | RAAPLLLARAA | 2 | 11 | | | | | | 834 |
| PAP | RAASLSLGFL | 10 | 10 | 0.0002 | | | | | 835 |
| PSM | RAFIDPLGL | 673 | 9 | 0.0001 | | | | | 836 |
| PSM | RARYTKNWET | 534 | 10 | | | | | | 837 |
| PAP | RATQTPSYKKL | 273 | 11 | | | | | | 838 |
| PSA | RAVCGGVL | 43 | 8 | −0.0001 | −0.0001 | 0.0003 | −0.0001 | −0.0001 | 839 |
| PSA | RAVCGGVLV | 43 | 9 | 0.0002 | | | | | 840 |
| Kallikrein | RAYSEKVT | 186 | 8 | −0.0001 | −0.0001 | 0.0003 | 0.0001 | −0.0001 | 841 |
| Kallikrein | RAYSEKVTEFM | 186 | 11 | 0.0007 | 0.0560 | 0.0016 | 0.0018 | 0.0009 | 842 |
| PSM | RIYNVIGT | 354 | 8 | | | | | | 843 |
| PSM | RIYNVIGTL | 354 | 9 | 0.0004 | | | | | 844 |
| PSM | RLGIASGRA | 527 | 9 | 0.0001 | | | | | 845 |
| PAP | RLHPYKDFI | 180 | 9 | 0.0006 | | | | | 846 |
| PAP | RLHPYKDFIA | 180 | 10 | 0.0048 | | | | | 847 |
| PAP | RLHPYKDFIAT | 180 | 11 | | | | | | 848 |
| PSM | RLLQERGV | 440 | 8 | | | | | | 849 |
| PSM | RLLQERGVA | 440 | 9 | 0.0001 | | | | | 850 |
| PSM | RLLQERGVAYI | 440 | 11 | | | | | | 851 |
| PSM | RLQDFDKSNPI | 649 | 11 | | | | | | 852 |
| PAP | RLQGGVLV | 257 | 8 | | | | | | 853 |
| PAP | RLQGGVLVNEI | 257 | 11 | | | | | | 854 |
| PSA | RLSEPAEL | 121 | 8 | 0.0004 | | | | | 855 |
| PSA | RLSEPAELT | 121 | 9 | 0.0003 | | | | | 856 |
| PSA | RLSEPAELTDA | 121 | 11 | 0.0007 | | | | | 857 |
| Kallikrein | RLSEPAKI | 125 | 8 | −0.0001 | 0.0005 | 0.0007 | −0.0001 | −0.0001 | 858 |
| Kallikrein | RLSEPAKIT | 125 | 9 | −0.0001 | −0.0002 | 0.0009 | −0.0001 | −0.0002 | 859 |
| Kallikrein | RLSEPAKITDV | 125 | 11 | 0.0015 | 0.0043 | 0.0210 | 0.0002 | 0.0006 | 860 |
| PSM | RMMNDQLM | 662 | 8 | | | | | | 861 |
| PSM | RMMNDQLMFL | 662 | 10 | 0.5100 | 1.6000 | 1.3000 | 0.0930 | 0.0005 | 862 |
| PSM | RQIYVAAFT | 730 | 9 | | | | | | 863 |
| PSM | RQIYVAAFTV | 730 | 10 | | | | | | 864 |
| PSM | RTEDFFKL | 181 | 8 | | | | | | 865 |
| PSM | RTILFASWDA | 414 | 10 | | | | | | 866 |
| PAP | RTLMSAMT | 111 | 8 | | | | | | 867 |
| PAP | RTLMSAMTNL | 111 | 10 | 0.0150 | | | | | 868 |
| PAP | RTLMSAMTNLA | 111 | 11 | | | | | | 869 |
| PSM | RVDGTPLM | 463 | 8 | | | | | | 870 |
| PSM | RVDCTPLMYSL | 463 | 11 | | | | | | 871 |
| PSM | SAFSPQGM | 162 | 8 | | | | | | 872 |
| PAP | SAHDTTVSGL | 287 | 10 | 0.0002 | | | | | 873 |
| PAP | SAMTNLAA | 115 | 8 | | | | | | 874 |
| PAP | SAMTNLAAL | 115 | 9 | 0.0043 | | | | | 875 |
| PSM | SAVKNFTEI | 634 | 9 | 0.0001 | | | | | 876 |
| PSM | SAVKNFTEIA | 634 | 10 | | | | | | 877 |
| Kallikrein | SIALSVGCT | 7 | 9 | −0.0001 | 0.0006 | 0.0087 | 0.0006 | 0.0004 | 878 |
| Kallikrein | SIALSVGCTGA | 7 | 11 | 0.0029 | 0.0066 | 0.0160 | 0.0100 | 0.0055 | 879 |
| PSM | SIEGNYTL | 455 | 8 | | | | | | 880 |
| PSM | SIEGNYTLRV | 455 | 10 | 0.0001 | | | | | 881 |
| Kallikrein | SIEPEEFL | 159 | 8 | 0.0001 | | | | | 882 |
| PSA | SIEPEEFL | 155 | 8 | 0.0001 | | | | | 883 |
| PSA | SIEPEEFLT | 155 | 9 | 0.0001 | | | | | 884 |
| PSM | SIINEDGNEI | 129 | 10 | 0.0001 | | | | | 885 |
| PSM | SISMKMPQEM | 613 | 10 | | | | | | 886 |
| PAP | SIWNPILL | 130 | 8 | | | | | | 887 |
| PSA | SLFHPEDT | 75 | 8 | 0.0003 | 0.0032 | 0.0028 | −0.0001 | −0.0001 | 888 |
| PSA | SLFHPEDTGQV | 75 | 11 | 0.0190 | | | | | 889 |
| PSM | SLFSAVKNFT | 631 | 10 | 0.0010 | | | | | 890 |
| PAP | SLGFLFLL | 15 | 8 | | | | | | 891 |
| Kallikrein | SLHLLSNDM | 175 | 9 | 0.0003 | 0.0720 | 0.0180 | −0.0001 | 0.0004 | 892 |
| Kallikrein | SLHLLSNDMCA | 175 | 11 | 0.0390 | 1.9000 | 0.6900 | 0.0005 | 0.0004 | 893 |
| PSM | SLKVPYNV | 322 | 8 | | | | | | 894 |
| Kallikrein | SLLKHQSL | 104 | 8 | 0.0002 | 0.0007 | 0.0002 | −0.0001 | −0.0001 | 895 |
| PSA | SLLKNRFL | 100 | 8 | 0.0020 | | | | | 896 |
| PAP | SLLSLYGI | 242 | 8 | | | | | | 897 |
| Kallikrein | SLQCVSLHL | 170 | 9 | 0.0100 | 0.0840 | 0.0240 | 0.0006 | 0.0031 | 898 |
| Kallikrein | SLQCVSLHLL | 170 | 10 | 0.0099 | 0.4000 | 0.0920 | 0.0059 | 0.0008 | 899 |
| PAP | SLSLGFLFL | 13 | 9 | 0.0200 | | | | | 900 |
| PAP | SLSLGFLFLL | 13 | 10 | 0.0170 | | | | | 901 |
| PSM | SLVHNLTKEL | 472 | 10 | 0.0002 | | | | | 902 |
| PSM | SMKHPQEM | 615 | 8 | | | | | | 903 |
| PSM | SMKHPQEMKT | 615 | 10 | 0.0001 | | | | | 904 |
| Kallikrein | SQPWQVAV | 35 | 8 | | | | | | 905 |
| PSA | SQPWQVLV | 31 | 8 | | | | | | 906 |
| PSA | SQPWQVLVA | 31 | 9 | | | | | | 907 |
| Kallikrein | SQVWLGRHNL | 71 | 10 | | | | | | 908 |
| PSM | SQWKEFGL | 98 | 8 | | | | | | 909 |
| PSM | SQWKEFGLDSV | 98 | 11 | | | | | | 910 |
| PSA | STCSGDSGGPL | 203 | 11 | 0.0005 | 0.0150 | 0.0092 | 0.0002 | 0.0035 | 911 |
| PAP | STDVDRTL | 106 | 8 | | | | | | 912 |
| PAP | STDVDRTLM | 106 | 9 | | | | | | 913 |
| PAP | STDVDRTLMSA | 106 | 11 | | | | | | 914 |
| PSM | STEWAEENSRL | 431 | 11 | | | | | | 915 |
| PSM | STNEVTRI | 348 | 8 | | | | | | 916 |
| PSM | STNEVTRIYNV | 348 | 11 | | | | | | 917 |
| PSM | STQKVKMHI | 338 | 9 | 0.0001 | | | | | 918 |
| PSM | SVELAHYDV | 107 | 9 | 0.0001 | | | | | 919 |
| PSM | SVELAHYDVL | 107 | 10 | 0.0002 | | | | | 920 |
| PSM | SVELAHYDVLL | 107 | 11 | | | | | | 921 |
| Kallikrein | SVGCTGAV | 11 | 8 | 0.0004 | 0.0006 | 0.0022 | 0.0003 | −0.0001 | 922 |
| Kallikrein | SVGGTGAVPL | 11 | 10 | 0.0024 | 0.0760 | 0.0065 | 0.0026 | 0.0035 | 923 |
| Kallikrein | SVGCTGAVPLI | 11 | 11 | 0.0100 | 0.0010 | 0.0007 | 0.0007 | 0.0005 | 924 |
| PAP | SVHNFTLPSWA | 217 | 11 | | | | | | 925 |
| PSA | SVILLGRHSL | 67 | 10 | 0.0001 | | | | | 926 |
| PAP | SVLAKELKFV | 29 | 10 | 0.0031 | | | | | 927 |
| PAP | SVLAKELKFVT | 29 | 11 | | | | | | 928 |
| PSM | SVSFDSLESA | 626 | 10 | | | | | | 929 |
| PSM | SVSFDSLFSAV | 626 | 11 | | | | | | 930 |
| PSA | SVTWIGAA | 7 | 8 | 0.0001 | | | | | 931 |
| PSA | SVTWIGAAPL | 7 | 10 | 0.0001 | | | | | 932 |
| PSA | SVTWIGAAPLI | 7 | 11 | 0.0001 | | | | | 933 |
| PSM | SVYETYEL | 554 | 8 | | | | | | 934 |
| PSM | SVYETYELV | 554 | 9 | 0.0073 | | | | | 935 |
| PSA | TAAHCIRNKSV | 58 | 11 | 0.0005 | 0.0057 | 0.0085 | 0.0004 | 0.0105 | 936 |
| PSM | TARRPRWL | 14 | 8 | | | | | | 937 |
| PSM | TARRPRWLCA | 14 | 10 | | | | | | 938 |
| PSM | TILFASWDA | 415 | 9 | | | | | | 939 |
| PAP | TLGKLSGL | 190 | 8 | | | | | | 940 |
| PAP | TLKSEEFQKRL | 171 | 11 | | | | | | 941 |
| PAP | TLMSAMTNL | 112 | 9 | 0.0650 | | | | | 942 |
| PAP | TLMSAMTNLA | 112 | 10 | 0.0065 | | | | | 943 |
| PAP | TLMSAMTNLAA | 112 | 11 | | | | | | 944 |
| PAP | TLPSWATEDT | 222 | 10 | 0.0002 | | | | | 945 |
| PAP | TLPSWATEDTM | 222 | 11 | | | | | | 946 |
| PSM | TLRVDCTPL | 461 | 9 | 0.0012 | | | | | 947 |
| PSM | TLRVDCTPLM | 461 | 10 | 0.0008 | | | | | 948 |
| PSA | TLSVTWIGA | 5 | 9 | 0.0016 | | | | | 949 |
| PSA | TLSVTWIGAA | 5 | 10 | 0.0007 | | | | | 950 |
| PAP | TMTKLREL | 231 | 8 | | | | | | 951 |
| PAP | TMTKLRELSEL | 231 | 11 | | | | | | 952 |
| Kallikrein | TQEPALGT | 143 | 8 | | | | | | 953 |
| PSA | TQEPALGT | 139 | 8 | | | | | | 954 |
| Kallikrein | TQEPALGTT | 143 | 9 | | | | | | 955 |
| PSA | TQEPALGTT | 139 | 9 | | | | | | 956 |
| PAP | TQHEPYPL | 335 | 8 | | | | | | 957 |
| PAP | TQHEPYPLM | 335 | 9 | | | | | | 958 |
| PAP | TQHEPYPLML | 335 | 10 | | | | | | 959 |
| PSM | TQIPHLAGT | 78 | 9 | | | | | | 960 |
| PAP | TQIPSYKKL | 275 | 9 | | | | | | 961 |
| PAP | TQIPSYKKLI | 275 | 10 | | | | | | 962 |
| PAP | TQIPSYKKLIM | 275 | 11 | | | | | | 963 |
| PSM | TQKVKMHI | 339 | 8 | | | | | | 964 |
| PSM | TQKVKMHIHST | 339 | 11 | | | | | | 965 |
| PAP | TQLGMEQHYEL | 71 | 11 | | | | | | 966 |
| Kallikrein | TTCYASGWGSI | 150 | 11 | −0.0001 | 0.0009 | 0.0025 | 0.0005 | 0.1400 | 967 |
| PSA | TTCYASGWGSI | 146 | 11 | −0.0001 | 0.0009 | 0.0025 | 0.0005 | 0.1400 | 968 |
| PAP | TTNSHQGT | 374 | 8 | | | | | | 969 |
| PAP | TTVSGLQM | 291 | 8 | | | | | | 970 |
| PAP | TTVSGLQMA | 291 | 9 | | | | | | 971 |
| PAP | TTVSGLQMAL | 291 | 10 | 0.0020 | | | | | 972 |
| PSM | TVAQVRGGM | 575 | 9 | | | | | | 973 |
| PSM | TVAQVRGGMV | 575 | 10 | 0.0005 | | | | | 974 |
| PAP | TVPLSEDQL | 145 | 9 | 0.0002 | | | | | 975 |
| PAP | TVPLSEDQLL | 145 | 10 | 0.0001 | | | | | 976 |
| PSM | TVQAAAET | 738 | 8 | | | | | | 977 |
| PSM | TVQAAAETL | 738 | 9 | 0.0002 | | | | | 978 |
| PAP | TVSGLQMA | 292 | 8 | | | | | | 979 |
| PAP | TVSGLQMAL | 292 | 9 | 0.0044 | | | | | 980 |
| PAP | TVSGLQMALDV | 292 | 11 | | | | | | 981 |
| PSM | VAAFTVQA | 734 | 8 | | | | | | 982 |
| PSM | VAAFTVQAA | 734 | 9 | | | | | | 983 |
| PSM | VAAFTVQAAA | 734 | 10 | | | | | | 984 |
| PSM | VAQVRGGM | 576 | 8 | | | | | | 985 |
| PSM | VAQVRGGMV | 576 | 9 | 0.0002 | | | | | 986 |
| PSA | VASRGRAV | 38 | 8 | −0.0001 | −0.0001 | −0.0001 | −0.0001 | −0.0001 | 987 |
| PSM | VATARRPRWL | 12 | 10 | 0.0001 | | | | | 988 |
| Kallikrein | VAVYSHGWA | 40 | 9 | −0.0001 | −0.0001 | 0.0002 | 0.0002 | 0.0004 | 989 |
| PSM | VAYINADSSI | 447 | 10 | 0.0001 | | | | | 990 |
| PSM | VIARYGKV | 201 | 8 | | | | | | 991 |
| PSM | VIGTLRGA | 358 | 8 | | | | | | 992 |
| PSM | VIGTLRGAV | 358 | 9 | 0.0002 | | | | | 993 |
| PSM | VILGGHRDSWV | 372 | 11 | | | | | | 994 |
| PSA | VILLGRHSL | 68 | 9 | 0.0003 | | | | | 995 |
| PSM | VILYSDPA | 225 | 8 | | | | | | 996 |
| PAP | VIPQDWST | 363 | 8 | | | | | | 997 |
| PAP | VIPQDWSTECM | 363 | 11 | | | | | | 998 |
| PSA | VISNDVCA | 174 | 8 | 0.0001 | | | | | 999 |
| PSA | VISNDVCAQV | 174 | 10 | 0.0008 | | | | | 1000 |
| PSM | VLAGGFFL | 27 | 8 | | | | | | 1001 |
| PSM | VLAGGFFLL | 27 | 9 | 0.1300 | 19.0000 | 0.3000 | 0.1200 | 0.0028 | 1002 |
| PAP | VLAKELKFV | 30 | 9 | 0.0590 | | | | | 1003 |
| PAP | VLAKELKFVT | 30 | 10 | 0.0021 | | | | | 1004 |
| PAP | VLAKELKFVTL | 30 | 11 | | | | | | 1005 |
| Kallikrein | VLGLPTQEPA | 138 | 10 | 0.0008 | 0.0150 | 0.0110 | 0.0004 | −0.0001 | 1006 |
| Kallikrein | VLGLPTQEPAL | 138 | 11 | −0.0001 | 0.0007 | 0.0003 | 0.0003 | 0.0006 | 1007 |
| PSM | VLLSYPNKT | 115 | 9 | 0.0002 | | | | | 1008 |
| PSM | VLPFDCRDYA | 592 | 10 | 0.0013 | | | | | 1009 |
| PSM | VLPFDCRDYAV | 592 | 11 | | | | | | 1010 |
| PSM | VLRKYADKI | 603 | 9 | 0.0002 | | | | | 1011 |
| PSM | VLRMMNDQL | 660 | 9 | 0.0001 | | | | | 1012 |
| PSM | VLRMMNDQLM | 660 | 10 | 0.0003 | | | | | 1013 |
| Kallikrein | VLSIALSV | 5 | 8 | 0.0050 | 0.0790 | 0.0200 | 0.0024 | 0.0003 | 1014 |
| Kallikrein | VLSIALSVGCT | 5 | 11 | 0.0002 | 0.0011 | 0.0048 | 0.0004 | 0.0005 | 1015 |
| PSA | VLTAAHCI | 56 | 8 | 0.0001 | | | | | 1016 |
| Kallikrein | VLTAAHCL | 60 | 8 | 0.0002 | 0.0034 | 0.0001 | 0.0001 | 0.0002 | 1017 |
| PSA | VLVASRGRA | 36 | 9 | 0.0001 | | | | | 1018 |
| PSA | VLVASRGRAV | 36 | 10 | 0.0003 | | | | | 1019 |
| Kallikrein | VLVHPQWV | 53 | 8 | 0.0001 | | | | | 1020 |
| PSA | VLVHPQWV | 49 | 8 | 0.0001 | | | | | 1021 |
| Kallikrein | VLVHPQWVL | 53 | 9 | 0.0200 | | | | | 1022 |
| PSA | VLVHPQWVL | 49 | 9 | 0.0200 | | | | | 1023 |
| Kallikrein | VLVHPQWVLT | 53 | 10 | 0.0001 | | | | | 1024 |
| PSA | VLVHPQWVLT | 49 | 10 | 0.0001 | | | | | 1025 |
| Kallikrein | VLVHPQWVLTA | 53 | 11 | 0.0130 | | | | | 1026 |
| PSA | VLVHPQWVLTA | 49 | 11 | 0.0130 | | | | | 1027 |
| PAP | VLVNEILNHM | 262 | 10 | 0.0008 | | | | | 1028 |
| PSA | VMDLPTQEPA | 134 | 10 | 0.0001 | | | | | 1029 |
| PSA | VMDLPTQEPAL | 134 | 11 | 0.0021 | 0.0042 | 0.0014 | 0.0001 | 0.0003 | 1030 |
| PSM | VQAAAETL | 739 | 8 | | | | | | 1031 |
| PSM | VQAAAETLSEV | 739 | 11 | | | | | | 1032 |
| PSM | VQRGNILNL | 253 | 9 | | | | | | 1033 |
| Kallikrein | VTEFMLCA | 192 | 8 | −0.0001 | 0.0003 | 0.0005 | 0.0007 | 0.0007 | 1034 |
| Kallikrein | VTEFMLCAGL | 192 | 10 | 0.0008 | 0.0180 | 0.0068 | 0.0004 | 0.0030 | 1035 |
| PSA | VTKFMLCA | 188 | 8 | 0.0001 | 0.0002 | 0.0031 | −0.0001 | −00001 | 1036 |
| PSM | VTRIYNVI | 352 | 8 | | | | | | 1037 |
| PSM | VTRIYNVIGT | 352 | 10 | | | | | | 1038 |
| PSM | VTRIYNVIGTL | 352 | 11 | | | | | | 1039 |
| PSA | VTWIGAAPL | 8 | 9 | 0.0110 | | | | | 1040 |
| PSA | VTWIGAAPLI | 8 | 10 | 0.0019 | | | | | 1041 |
| PSA | VTWIGAAPLIL | 8 | 11 | 0.0013 | 0.0005 | 0.0009 | 0.0011 | 0.0002 | 1042 |
| PSA | VVFLTLSV | 1 | 8 | 0.0002 | | | | | 1043 |
| PSA | VVFLTLSVT | 1 | 9 | 0.0008 | | | | | 1044 |
| PSA | VVFLTLSVTWI | 1 | 11 | 0.0069 | | | | | 1045 |
| PSM | VVHEIVRSFGT | 394 | 11 | | | | | | 1046 |
| Kallikrein | VVHYRKWI | 246 | 8 | 0.0001 | 0.0021 | −0.0001 | 0.0001 | −0.0001 | 1047 |
| PSA | VVHYRKWI | 242 | 8 | 0.0001 | 0.0021 | −0.0001 | 0.0001 | −0.0001 | 1048 |
| Kallikrein | VVHYRKWIKDT | 246 | 11 | 0.0001 | 0.0001 | 0.0002 | 0.0001 | 0.0004 | 1049 |
| PSA | VVHYRKWIKDT | 242 | 11 | 0.0001 | 0.0001 | 0.0002 | −0.0001 | 0.0004 | 1050 |
| Kallikrein | VVKVLGLPT | 135 | 9 | −0.0001 | −0.0005 | 0.0007 | 0.0008 | −0.0002 | 1051 |
| PSM | VVLRKYADKI | 602 | 10 | 0.0001 | | | | | 1052 |
| PSM | WAEENSRL | 434 | 8 | | | | | | 1053 |
| PSM | WAEENSRLL | 434 | 9 | 0.0001 | | | | | 1054 |
| Kallikrein | WAHCGGVL | 47 | 8 | −0.0001 | 0.0003 | 0.0005 | 0.0001 | 0.0070 | 1055 |
| Kallikrein | WAHCGGVLV | 47 | 9 | −0.0001 | 0.0004 | 0.0067 | 0.0007 | 0.0310 | 1056 |
| PAP | WATEDTMT | 226 | 8 | | | | | | 1057 |
| PAP | WATEDTMTKL | 226 | 10 | 0.0002 | | | | | 1058 |
| PSA | WIGAAPLI | 10 | 8 | 0.0005 | | | | | 1059 |
| PSA | WIGAAPLIL | 10 | 9 | 0.0005 | | | | | 1060 |
| Kallikrein | WIKDTIAA | 252 | 8 | 0.0002 | 0.0120 | 0.1700 | 0.0002 | −0.0001 | 1061 |
| PSA | WIKDTIVA | 248 | 8 | 0.0001 | | | | | 1062 |
| PSM | WLCAGALV | 20 | 8 | | | | | | 1063 |
| PSM | WLCAGALVL | 20 | 9 | 0.0180 | | | | | 1064 |
| PSM | WLCAGALVLA | 20 | 10 | 0.0120 | | | | | 1065 |
| PAP | WLDRSVLA | 25 | 8 | | | | | | 1066 |
| PAP | WLDRSVLAKEL | 25 | 11 | | | | | | 1067 |
| PAP | WQPIPVHT | 138 | 8 | | | | | | 1068 |
| PAP | WQPIPVHTV | 138 | 9 | | | | | | 1069 |
| PAP | WQPIPVHTVPL | 138 | 11 | | | | | | 1070 |
| Kallikrein | WQVAVYSHGWA | 38 | 11 | | | | | | 1071 |
| PSA | WQVLVASRGRA | 34 | 11 | | | | | | 1072 |
| PSA | WVLTAAHCI | 55 | 9 | 0.0008 | | | | | 1073 |
| Kallikrein | WVLTAAHCL | 59 | 9 | 0.0003 | 0.0018 | 0.0001 | 0.0160 | 0.0007 | 1074 |
| PSM | YADKIYSI | 607 | 8 | | | | | | 1075 |
| PSM | YADKIYSISM | 607 | 10 | | | | | | 1076 |
| PSM | YAGESFPGI | 700 | 9 | 0.0013 | | | | | 1077 |
| PSM | YAPSSHNKYA | 692 | 10 | | | | | | 1078 |
| PSM | YARTEDFFKL | 179 | 10 | 0.0002 | | | | | 1079 |
| PAP | YASCHLTEL | 310 | 9 | 0.0037 | | | | | 1080 |
| Kallikrein | YASGWGSI | 153 | 8 | −0.0001 | 0.0009 | 0.0003 | 0.0003 | 0.0120 | 1081 |
| PSA | YASGWGSI | 149 | 8 | −0.0001 | 0.0009 | 0.0003 | 0.0003 | 0.0120 | 1082 |
| PSM | YAVVLRKYA | 600 | 9 | | | | | | 1083 |
| PSM | YAYRRCIA | 277 | 8 | | | | | | 1084 |
| PSM | YAYRRGIAEA | 277 | 10 | | | | | | 1085 |
| PSM | YAYRRGIAEAV | 277 | 11 | | | | | | 1086 |
| PSM | YINADSSI | 449 | 8 | | | | | | 1087 |
| PAP | YIRKRYRKFL | 84 | 10 | 0.0002 | | | | | 1088 |
| PAP | YIRSTDVDRT | 103 | 10 | | | | | | 1089 |
| PAP | YIRSTDVDRTL | 103 | 11 | | | | | | 1090 |
| Kallikrein | YTKVVHYRKWI | 243 | 11 | 0.0001 | −0.0001 | 0.0004 | −0.0001 | 0.0008 | 1091 |
| PSA | YTKVVHYRKWL | 239 | 11 | 0.0001 | −0.0001 | 0.0004 | −0.0001 | 0.0008 | 1092 |
| PSM | YTLRVDCT | 460 | 8 | | | | | | 1093 |
| PSM | YTLRVDCTPL | 460 | 10 | 0.0015 | | | | | 1094 |
| PSM | YTLRVDCTPLM | 460 | 11 | | | | | | 1095 |
| PSM | YVAAFTVQA | 733 | 9 | | | | | | 1096 |
| PSM | YVAAFTVQAA | 733 | 10 | | | | | | 1097 |
| PSM | YVAAFTVQAAA | 733 | 11 | | | | | | 1098 |

[0442] TABLE IX
Prostate A03 Supermotif with Binding Data

| | | | | | | | | | |
|---|---|---|---|---|---|---|---|---|---|
| | | | No. of | | | | | | Seq. |
| | | | Amino | | | | | | Id. |
| Protein | Sequence | Position | Acids | A*0301 | A*1101 | A*3101 | A*3301 | A*6801 | No. |

| | | | | | | | | | |
|---|---|---|---|---|---|---|---|---|---|
| PSA | AAHCIRNK | 59 | 8 | | | | | | 1099 |
| PSA | AAPLILSR | 13 | 8 | | | | | | 1100 |
| PAP | AAPLLLAR | 3 | 8 | | | | | | 1101 |
| PSM | AAVVHEIVR | 392 | 9 | | | | | | 1102 |
| PSM | ALFDIESK | 711 | 8 | | | | | | 1103 |
| Kallikrein | ALPEKPAVYTK | 235 | 11 | | | | | | 1104 |
| PSA | ALPERPSLYTK | 231 | 11 | | | | | | 1105 |
| PSM | ASGRARYTK | 531 | 9 | 0.0086 | 0.2700 | | | | 1106 |
| PAP | ATEDTMTK | 227 | 8 | 0.0003 | 0.0039 | | | | 1107 |
| PAP | ATEDTMTKLR | 227 | 10 | | | | | | 1108 |
| PSM | ATNITPKHNMK | 49 | 11 | | | | | | 1109 |
| PAP | ATQFPSYK | 274 | 8 | 0.0180 | 0.0700 | | | | 1110 |
| PAP | ATQIPSYKK | 274 | 9 | 0.1000 | 1.2000 | | | | 1111 |
| PSM | AVATARRPR | 11 | 9 | | | | | | 1112 |
| PSM | AVKNFTEIASK | 635 | 11 | | | | | | 1113 |
| Kallikrein | AVPLIQSR | 17 | 8 | | | | | | 1114 |
| PSM | AVVHEIVR | 393 | 8 | | | | | | 1115 |
| PSM | AVVLRKYADK | 601 | 10 | 0.0026 | 0.0210 | | | | 1116 |
| Kallikrein | AVYTKVVHYR | 241 | 10 | | | | | | 1117 |
| Kallikrein | AVYTKVVHYRK | 241 | 11 | | | | | | 1118 |
| Kallikrein | CAGLWTGGK | 198 | 9 | | | | | | 1119 |
| PSA | CAGRWTGGK | 194 | 9 | 0.0006 | 0.0015 | | | | 1120 |
| PSA | CAQVHPQK | 180 | 8 | | | | | | 1121 |
| PSA | CAQVHPQKVTK | 180 | 11 | | | | | | 1122 |
| Kallikrein | CARAYSEK | 184 | 8 | | | | | | 1123 |
| PSM | CSGKIVIAR | 196 | 9 | | | | | | 1124 |
| PAP | CSPSCPLER | 347 | 9 | 0.0040 | 0.0006 | | | | 1125 |
| Kallikrein | CTGAVPLIQSR | 14 | 11 | | | | | | 1126 |
| PSM | DALFDIESK | 710 | 9 | 0.0006 | 0.0002 | | | | 1127 |
| PSM | DAQKLLEK | 301 | 8 | | | | | | 1128 |
| PSM | DIESKVDPSK | 714 | 10 | 0.0003 | 0.0002 | | | | 1129 |
| PAP | DLFGIWSK | 201 | 8 | | | | | | 1130 |
| PSM | DLVYVNYAR | 173 | 9 | | | | | | 1131 |
| Kallikrein | DMCARAYSEK | 182 | 10 | | | | | | 1132 |
| PSM | DMKINCSGK | 191 | 9 | | | | | | 1133 |
| PSA | DMSLLKNR | 98 | 8 | 0.0003 | 0.0001 | | | | 1134 |
| PSA | DMSLLKNRFLR | 98 | 11 | | | | | | 1135 |
| PSM | DSAVATAR | 9 | 8 | | | | | | 1136 |
| PSM | DSAVATARR | 9 | 9 | | | | | | 1137 |
| PSM | DSAVATARRPR | 9 | 11 | | | | | | 1138 |
| PSM | DSLFSAVK | 630 | 8 | | | | | | 1139 |
| Kallikrein | DSSHDLMLLR | 116 | 10 | | | | | | 1140 |
| PSA | DSSHDLMLLR | 112 | 10 | | | | | | 1141 |
| PSM | DSSIEGNYTLR | 453 | 11 | | | | | | 1142 |
| PSM | DSSWRGSLK | 316 | 9 | 0.0032 | 0.0003 | | | | 1143 |
| PAP | DTFPTDPIK | 51 | 9 | 0.0001 | 0.0001 | | | | 1144 |
| PSA | DVCAQVHPQK | 178 | 10 | 0.0007 | 0.0011 | | | | 1145 |
| PSM | DVLLSYPNK | 114 | 9 | 0.0006 | 0.0010 | | | | 1146 |
| PSM | EATNITPK | 48 | 8 | | | | | | 1147 |
| PSM | EIASKFSER | 641 | 9 | 0.0006 | 0.0002 | | | | 1148 |
| PAP | EILNHMKR | 266 | 8 | | | | | | 1149 |
| PSM | EIVRSFGTLK | 397 | 10 | | | | | | 1150 |
| PSM | EIVRSFGTLKK | 397 | 11 | | | | | | 1151 |
| PAP | ELESETLK | 166 | 8 | | | | | | 1152 |
| PAP | ELGEYIRK | 80 | 8 | | | | | | 1153 |
| PAP | ELGEYIRKR | 80 | 9 | | | | | | 1154 |
| PAP | ELGEYIRKRYR | 80 | 11 | | | | | | 1155 |
| PSM | ELKAENIK | 64 | 8 | | | | | | 1156 |
| PSM | ELKAENIKK | 64 | 9 | | | | | | 1157 |
| PAP | ELKFVTLVFR | 34 | 10 | 0.0014 | 0.0037 | | | | 1158 |
| PSM | ESKVDPSK | 716 | 8 | | | | | | 1159 |
| PAP | ESYKHEQVYIR | 95 | 11 | | | | | | 1160 |
| PSM | ETDSAVATAR | 7 | 10 | | | | | | 1161 |
| PSM | ETDSAVATARR | 7 | 11 | | | | | | 1162 |
| PAP | ETLKSEEFQK | 170 | 10 | 0.0004 | 0.0140 | | | | 1163 |
| PAP | ETLKSEEFQKR | 170 | 11 | | | | | | 1164 |
| PSM | ETYELVEK | 557 | 8 | | | | | | 1165 |
| PSM | FIDPLGLPDR | 675 | 10 | | | | | | 1166 |
| PSM | FLDELKAENIK | 61 | 11 | | | | | | 1167 |
| PSM | FLFGWFIK | 37 | 8 | | | | | | 1168 |
| PAP | FLFLLFFWLDR | 18 | 11 | | | | | | 1169 |
| PAP | FLLFFWLDR | 20 | 9 | 0.0024 | 0.0004 | | | | 1170 |
| PSM | FSERLQDFDK | 646 | 10 | 0.0003 | 0.0007 | | | | 1171 |
| PSM | FSGMPRISK | 506 | 9 | | | | | | 1172 |
| PSM | FTEIASKFSER | 639 | 11 | | | | | | 1173 |
| PSM | FTGNFSTQK | 333 | 9 | | | | | | 1174 |
| PSM | FTGNFSTQKVK | 333 | 11 | | | | | | 1175 |
| PAP | FVTLVFRHGDR | 37 | 11 | | | | | | 1176 |
| PSA | GAAPLILSR | 12 | 9 | 0.0150 | 0.0350 | | | | 1177 |
| PSM | GAAVVHEIVR | 391 | 10 | | | | | | 1178 |
| Kallikrein | GAVPLIQSR | 16 | 9 | | | | | | 1179 |
| PSM | GIASGRAR | 529 | 8 | | | | | | 1180 |
| PSM | GIASGRARYTK | 529 | 11 | | | | | | 1181 |
| PAP | GIHKQKEK | 248 | 8 | | | | | | 1182 |
| PAP | GIHKQKEKSR | 248 | 10 | | | | | | 1183 |
| PSM | GLPDRPFYR | 680 | 9 | 0.0460 | 0.0280 | | | | 1184 |
| PSM | GSAPPDSSWR | 311 | 10 | 0.0006 | 0.1400 | | | | 1185 |
| PSA | GSEPCALPER | 226 | 10 | | | | | | 1186 |
| Kallikrein | GSIEPEEFLR | 158 | 10 | | | | | | 1187 |
| PSM | GSTEWAEENSR | 430 | 11 | | | | | | 1188 |
| PSM | GTEQNFQLAK | 85 | 10 | | | | | | 1189 |
| PSM | GTLKKEGWR | 403 | 9 | | | | | | 1190 |
| PSM | GTLKKEGWRPR | 403 | 11 | | | | | | 1191 |
| PSM | GTLRGAVEPDR | 360 | 11 | | | | | | 1192 |
| PSM | HIHSTNEVTR | 345 | 10 | | | | | | 1193 |
| Kallikrein | HLLSNDMCAR | 177 | 10 | | | | | | 1194 |
| PAP | HLTELYFEK | 314 | 9 | 0.2700 | 0.5300 | | | | 1195 |
| PSM | HLTVAQVR | 573 | 8 | | | | | | 1196 |
| PSM | HSTNEVTR | 347 | 8 | | | | | | 1197 |
| PSM | HVIYAPSSHNK | 689 | 11 | | | | | | 1198 |
| PSM | IARYGKVFR | 202 | 9 | | | | | | 1199 |
| PSM | IASGRARYTK | 530 | 10 | | | | | | 1200 |
| PSM | IASKFSER | 642 | 8 | | | | | | 1201 |
| PSM | ISMKHPQEMK | 614 | 10 | 0.1900 | 0.1100 | | | | 1202 |
| PSM | ITPKHNMK | 52 | 8 | | | | | | 1203 |
| Kallikrein | IVGGWECEK | 25 | 9 | 0.0410 | 0.0190 | 0.0002 | 0.0006 | 0.0018 | 1204 |
| PSA | IVGGWECEK | 21 | 9 | 0.0410 | 0.0190 | 0.0002 | 0.0006 | 0.0018 | 1205 |
| PSM | IVIARYGK | 200 | 8 | | | | | | 1206 |
| PSM | IVIARYGKVFR | 200 | 11 | | | | | | 1207 |
| PSM | IVLPFDCR | 591 | 8 | | | | | | 1208 |
| PSM | IVRSFGTLK | 398 | 9 | 0.1700 | 0.0087 | | | | 1209 |
| PSM | IVRSFGTLKK | 398 | 10 | 0.0260 | 0.0006 | | | | 1210 |
| PSM | KAFLDELK | 59 | 8 | | | | | | 1211 |
| PSM | KAWGEVKR | 723 | 8 | | | | | | 1212 |
| PSM | KIVIARYGK | 199 | 9 | 0.0740 | 1.0000 | | | | 1213 |
| PSM | KIYSISMK | 610 | 8 | | | | | | 1214 |
| PAP | KSEEFQKR | 173 | 8 | | | | | | 1215 |
| PSM | KSLYESWTK | 491 | 9 | 0.4000 | 2.1000 | | | | 1216 |
| PSM | KSLYESWTKK | 491 | 10 | 0.3200 | 0.0810 | | | | 1217 |
| PSM | KSNPIVLR | 655 | 8 | | | | | | 1218 |
| PSM | KSPDEGFEGK | 482 | 10 | 0.0044 | 0.0210 | | | | 1219 |
| PSA | KSVILLGR | 66 | 8 | | | | | | 1220 |
| PSM | KVFRGNKVK | 207 | 9 | 0.1600 | 0.1200 | | | | 1221 |
| PSM | KVKNAQLAGAK | 213 | 11 | | | | | | 1222 |
| PSA | KVTKFMLCAGR | 187 | 11 | | | | | | 1223 |
| Kallikrein | KVVHYRKWIK | 245 | 10 | 0.0450 | 0.0450 | | | | 1224 |
| PSA | KVVHYRKWIK | 241 | 10 | 0.0450 | 0.0450 | | | | 1225 |
| PSM | LAKQIQSQWK | 92 | 10 | 0.0031 | 0.0007 | | | | 1226 |
| PAP | LLFFWLDR | 21 | 8 | | | | | | 1227 |
| PSM | LLGFLFGWFIK | 34 | 11 | | | | | | 1228 |
| Kallikrein | LLKHQSLR | 105 | 8 | | | | | | 1229 |
| PSA | LLKNRFLR | 101 | 8 | | | | | | 1230 |
| Kallikrein | LLRLSEPAK | 123 | 9 | | | | | | 1231 |
| PAP | LLSLYGIHK | 243 | 9 | 0.0760 | 0.2000 | | | | 1232 |
| PAP | LLSLYGIHKQK | 243 | 11 | | | | | | 1233 |
| Kallikrein | LLSNDMCAR | 178 | 9 | | | | | | 1234 |
| PAP | LLYLPFRNCPR | 153 | 11 | | | | | | 1235 |
| Kallikrein | LMLLRLSEPAK | 121 | 11 | | | | | | 1236 |
| PSM | LMYSLVHNLTK | 469 | 11 | | | | | | 1237 |
| PAP | LSLLSLYGIHK | 241 | 11 | | | | | | 1238 |
| PAP | LSLYGIHK | 244 | 8 | | | | | | 1239 |
| PAP | LSLYGIHKQK | 244 | 10 | 0.0520 | 0.0370 | | | | 1240 |
| Kallikrein | LSNDMCAR | 179 | 8 | | | | | | 1241 |
| PSA | LTAAHCIR | 57 | 8 | | | | | | 1242 |
| PSA | LTAAHCIRNK | 57 | 10 | 0.1400 | 0.0830 | | | | 1243 |
| Kallikrein | LTAAHCLK | 61 | 8 | | | | | | 1244 |
| Kallikrein | LTAAHCLKK | 61 | 9 | | | | | | 1245 |
| PAP | LTELYFEK | 315 | 8 | 0.0014 | 0.0100 | | | | 1246 |
| PSM | LVEKFYDPMFK | 561 | 11 | | | | | | 1247 |
| PAP | LVFRKGDR | 40 | 8 | 0.0003 | 0.0002 | | | | 1248 |
| PSM | LVHNLTKELK | 473 | 10 | | | | | | 1249 |
| PAP | LVNEILNHMK | 263 | 10 | 0.0560 | 0.1200 | | | | 1250 |
| PAP | LVNEILNHMKR | 263 | 11 | | | | | | 1251 |
| PSM | LVYVNYAR | 174 | 8 | | | | | | 1252 |
| Kallikrein | MLCAGLWTGGK | 196 | 11 | | | | | | 1253 |
| PSA | MLCAGRWTGGK | 192 | 11 | | | | | | 1254 |
| Kallikrein | MLLRLSEPAK | 122 | 10 | | | | | | 1255 |
| PSM | MMNDQLMFLER | 663 | 11 | | | | | | 1256 |
| Kallikrein | MSLLKHQSLR | 103 | 10 | | | | | | 1257 |
| PSA | MSLLKNRFLR | 99 | 10 | 0.0070 | 0.0110 | | | | 1258 |
| PSM | NAQLAGAK | 216 | 8 | | | | | | 1259 |
| PSM | NITPKHNMK | 51 | 9 | | | | | | 1260 |
| Kallikrein | NLFEPEDTGQR | 79 | 11 | | | | | | 1261 |
| PSM | NLPGGGVQR | 247 | 9 | | | | | | 1262 |
| PSM | NMKAFLDELK | 57 | 10 | | | | | | 1263 |
| Kallikrein | NMSLLKHQSLR | 102 | 11 | | | | | | 1264 |
| PSM | NSIVLPFDCR | 589 | 10 | | | | | | 1265 |
| Kallikrein | NSQVWLGR | 70 | 8 | | | | | | 1266 |
| PSM | NSRLLQER | 438 | 8 | | | | | | 1267 |
| PSM | PADYFAPGVK | 231 | 10 | | | | | | 1268 |
| PSA | PAELTDAVK | 125 | 9 | 0.0002 | 0.0002 | 0.0004 | 0.0006 | 0.0001 | 1269 |
| Kallikrein | PAKITDVVK | 129 | 9 | | | | | | 1270 |
| PSM | PANEYAYR | 273 | 8 | | | | | | 1271 |
| PSM | PANEYAYRR | 273 | 9 | 0.0001 | 0.0002 | | | | 1272 |
| Kallikrein | PAVYTKVVHYR | 240 | 11 | | | | | | 1273 |
| PAP | PIDTFPTDPIK | 49 | 11 | | | | | | 1274 |
| PSM | PIGYYDAQK | 296 | 9 | | | | | | 1275 |
| PSM | PLGLPDRPFYR | 678 | 11 | | | | | | 1276 |
| PSA | PLYDMSLLK | 95 | 9 | 0.2400 | 0.0370 | 0.0002 | 0.0006 | 0.0001 | 1277 |
| PSA | PLYDMSLLKNR | 95 | 11 | | | | | | 1278 |
| Kallikrein | PLYNMSLLK | 99 | 9 | | | | | | 1279 |
| PSM | PSKAWGEVK | 721 | 9 | | | | | | 1280 |
| PSM | PSKAWGEVKR | 721 | 10 | 0.0003 | 0.0002 | | | | 1281 |
| PSA | PSLYTKVVHYR | 236 | 11 | | | | | | 1282 |
| PSM | PSPEFSGMPR | 502 | 10 | | | | | | 1283 |
| PAP | PSWATEDTMTK | 224 | 11 | | | | | | 1284 |
| PSM | QLAKQIQSQWK | 91 | 11 | | | | | | 1285 |
| PAP | QLLYLPFR | 152 | 8 | | | | | | 1286 |
| PSA | QVHPQKVTK | 182 | 9 | 0.0060 | 0.0140 | 0.0028 | 0.0014 | 0.0051 | 1287 |
| PSA | QVLVASRGR | 35 | 9 | 0.0021 | 0.0018 | | | | 1288 |
| PAP | QVYIRSTDVDR | 101 | 11 | | | | | | 1289 |
| PAP | RAAPLLLAR | 2 | 9 | 0.1500 | 0.1200 | | | | 1290 |
| PAP | RATQIPSYK | 273 | 9 | 0.0210 | 0.0600 | | | | 1291 |
| PAP | RATQIPSYKK | 273 | 10 | 0.0053 | 0.0250 | | | | 1292 |
| Kallikrein | RIVGGWECEK | 24 | 10 | 0.0460 | 0.0670 | | | | 1293 |
| PSA | RIVGGWECEK | 20 | 10 | 0.0460 | 0.0670 | | | | 1294 |
| PSM | RIYNVIGTLR | 354 | 10 | 0.3700 | 0.4300 | | | | 1295 |
| PSM | RLGIASGR | 527 | 8 | | | | | | 1296 |
| PSM | RLGIASGRAR | 527 | 10 | | | | | | 1297 |
| PSM | RSFGTLKK | 400 | 8 | | | | | | 1298 |
| PAP | RSVLAKELK | 28 | 9 | 0.0490 | 0.1100 | | | | 1299 |
| PSM | RTEDFFKLER | 181 | 10 | | | | | | 1300 |
| PSM | SAPPDSSWR | 312 | 9 | 0.0006 | 0.0012 | | | | 1301 |
| PSM | SAVATARR | 10 | 8 | | | | | | 1302 |
| PSM | SAVATARRPR | 10 | 10 | | | | | | 1303 |
| PSM | SIEGNYTLR | 455 | 9 | | | | | | 1304 |
| Kallikrein | SIEPEEFLR | 159 | 9 | | | | | | 1305 |
| Kallikrein | SIEPEEFLRPR | 159 | 11 | | | | | | 1306 |
| PSA | SIEPEEFLTPK | 155 | 11 | | | | | | 1307 |
| PSM | SISMKHPQEMK | 613 | 11 | | | | | | 1308 |
| PSM | SIVLPFDCR | 590 | 9 | 0.0006 | 0.0220 | | | | 1309 |
| Kallikrein | SLLKHQSLR | 104 | 9 | | | | | | 1310 |
| PSA | SLLKNRFLR | 100 | 9 | 0.0024 | 0.0470 | | | | 1311 |
| PAP | SLLSLYGIHK | 242 | 10 | 0.4900 | 2.3000 | | | | 1312 |
| PSM | SLVHNLTK | 472 | 8 | | | | | | 1313 |
| PSM | SLVHNLTKELK | 472 | 11 | | | | | | 1314 |
| PSM | SLYESWTK | 492 | 8 | | | | | | 1315 |
| PSM | SLYESWTKK | 492 | 9 | 1.0000 | 2.0000 | | | | 1316 |
| PAP | SLYGIHKQK | 245 | 9 | 1.1000 | 0.8000 | | | | 1317 |
| PAP | SLYGIHKQKEK | 245 | 11 | | | | | | 1318 |
| PSA | SLYTKVVHYR | 237 | 10 | 0.2800 | 0.2300 | | | | 1319 |
| PSA | SLYTKVVHYRK | 237 | 11 | | | | | | 1320 |
| PSM | SMKHPQEMK | 615 | 9 | 0.1100 | 0.0720 | | | | 1321 |
| Kallikrein | SSHDLMLLR | 117 | 9 | 0.0039 | 1.2000 | | | | 1322 |
| PSA | SSHDLMLLK | 113 | 9 | 0.0039 | 1.2000 | | | | 1323 |
| PSM | SSIEGNYTLR | 454 | 10 | 0.0007 | 0.0910 | | | | 1324 |
| PSM | SSNEATNITPK | 45 | 11 | | | | | | 1325 |
| PSM | SSWRGSLK | 317 | 8 | | | | | | 1326 |
| PSM | STEWAEENSR | 431 | 10 | 0.0005 | 0.0016 | | | | 1327 |
| PAP | SVLAKELK | 29 | 8 | 0.0017 | 0.0061 | | | | 1328 |
| PSM | SVYETYELVEK | 554 | 11 | | | | | | 1329 |
| PSA | TAAHCIRNK | 58 | 9 | 0.0094 | 0.0140 | | | | 1330 |
| Kallikrein | TAAHCLKK | 62 | 8 | | | | | | 1331 |
| PSM | TLKKEGWR | 404 | 8 | | | | | | 1332 |
| PSM | TLKKEGWRPR | 404 | 10 | 0.0007 | 0.0002 | | | | 1333 |
| PSM | TLKKEGWRPRR | 404 | 11 | | | | | | 1334 |
| PAP | TLKSEEFQK | 171 | 9 | 00006 | 0.0078 | | | | 1335 |
| PAP | TLKSEEFQKR | 171 | 10 | 0.0007 | 0.0001 | | | | 1336 |
| PSM | TLRGAVEPDR | 361 | 10 | 0.0003 | 0.0002 | | | | 1337 |
| PAP | TLVFRHGDR | 39 | 9 | 0.0006 | 0.0002 | | | | 1338 |
| PSM | VATARRPR | 12 | 8 | | | | | | 1339 |
| PSM | VIARYGKVFR | 201 | 10 | | | | | | 1340 |
| PSM | VIYAPSSHNK | 690 | 10 | 0.5400 | 0.7900 | | | | 1341 |
| PSM | VLLSYPNK | 115 | 8 | | | | | | 1342 |
| PSM | VLRKYADK | 603 | 8 | | | | | | 1343 |
| PSA | VLTAAHCIR | 56 | 9 | 0.0002 | 0.0005 | | | | 1344 |
| PSA | VLTAAHCIRNK | 56 | 11 | | | | | | 1345 |
| Kallikrein | VLTAAHCLK | 60 | 9 | | | | | | 1346 |
| Kallikrein | VLTAAHCLKK | 60 | 10 | | | | | | 1347 |
| PSA | VLVASRGR | 36 | 8 | | | | | | 1348 |
| PAP | VLVNEILNHMK | 262 | 11 | | | | | | 1349 |
| PSM | VSFDSLFSAVK | 627 | 11 | | | | | | 1350 |
| PSA | VTKFMLCAGR | 188 | 10 | 0.0003 | 0.0120 | | | | 1351 |
| PAP | VTLVFRHGDR | 38 | 10 | | | | | | 1352 |
| Kallikrein | VVHYRKWIK | 246 | 9 | 0.0072 | 0.0930 | 0.5500 | 0.0490 | 0.0028 | 1353 |
| PSA | VVIIYRKWIK | 242 | 9 | 0.0072 | 0.0930 | 0.5500 | 0.0490 | 0.0028 | 1354 |
| PSM | VVLRKYADK | 602 | 9 | 0.0390 | 0.0660 | | | | 1355 |
| PAP | WATEDTMTK | 226 | 9 | 0.0006 | 0.0002 | | | | 1356 |
| PAP | WATEDTMTKLR | 226 | 11 | | | | | | 1357 |
| PSA | WIGAAPLILSR | 10 | 11 | | | | | | 1358 |
| PAP | WLDRSVLAK | 25 | 9 | 0.0035 | 0.0150 | | | | 1359 |
| PSA | WVLTAAHCIR | 55 | 10 | 0.0004 | 0.0001 | | | | 1360 |
| Kallikrein | WVLTAAHCLK | 59 | 10 | | | | | | 1361 |
| Kallikrein | WVLTAAHCLKK 59 | 11 | | | | | | 1362 | |
| PSM | YADKIYSISMK | 607 | 11 | | | | | | 1363 |
| PSM | YAPSSHNK | 692 | 8 | | | | | | 1364 |
| PSM | YARTEDFFK | 179 | 9 | | | | | | 1365 |
| PSM | YAVVLRKYADK | 600 | 11 | | | | | | 1366 |
| PAP | YIRKRYRK | 84 | 8 | | | | | | 1367 |
| PAP | YIRSTDVDR | 103 | 9 | | | | | | 1368 |
| PAP | YLPFRNCPR | 155 | 9 | | | | | | 1369 |
| PSM | YSLVHNLTK | 471 | 9 | 0.0600 | 0.5400 | | | | 1370 |
| PSM | YTKNWETNK | 537 | 9 | | | | | | 1371 |
| Kallikrein | YTKVVHYR | 243 | 8 | | | | | | 1372 |
| PSA | YTKVVHYR | 239 | 8 | | | | | | 1373 |
| Kallikrein | YTKVVHYRK | 243 | 9 | 0.0006 | 0.0580 | 1.2000 | 2.8000 | 1.3000 | 1374 |
| PSA | YTKVVHYRK | 239 | 9 | 0.0006 | 0.0580 | 1.2000 | 2.8000 | 1.3000 | 1375 |
| PSM | YVILGGHR | 371 | 8 | | | | | | 1376 |

[0443] TABLE X

Prostate A24 Supermotif Peptides
with Binding Data

| | | | | | |
|---|---|---|---|---|---|
| | | | | | Seq. |
| | | | Amino | | Id. |
| Protein | Sequence | Position | Acids | A*2401 | No. |

| | | | | | |
|---|---|---|---|---|---|
| PSM | AFIDPLGL | 674 | 8 | | 1377 |
| PSM | AFLDELKAENI | 60 | 11 | | 1378 |
| PSM | AFTVQAAAETL | 736 | 11 | | 1379 |
| PAP | ALDVYNGL | 299 | 8 | | 1380 |
| PAP | ALDVYNGLL | 299 | 9 | | 1381 |
| PAP | ALFPPEGVSI | 122 | 10 | | 1382 |
| PAP | ALFPPEGVSIW | 122 | 11 | | 1383 |
| Kallikrein | ALGTTCYASGW | 147 | 11 | | 1384 |
| PSA | ALGTTCYASGW | 143 | 11 | | 1385 |
| Kallikrein | ALPEKPAVY | 235 | 9 | | 1386 |
| PSA | ALPERPSL | 231 | 8 | | 1387 |
| PSA | ALPERPSLY | 231 | 9 | | 1388 |
| PSM | ALVLAGGF | 25 | 8 | | 1389 |
| PSM | ALVLAGGFF | 25 | 9 | | 1390 |
| PSM | ALVLAGGFFL | 25 | 10 | | 1391 |
| PSM | ALVLAGGFFLL | 25 | 11 | | 1392 |
| PAP | AMTNLAAL | 116 | 8 | | 1393 |
| PAP | AMTNLAALP | 116 | 9 | 0.0150 | 1394 |
| PSM | ATARRPRW | 13 | 8 | | 1395 |
| PSM | ATARRPRWL | 13 | 9 | | 1396 |
| PAP | ATEDTMTKL | 227 | 9 | | 1397 |
| PAP | ATLGKLSGL | 189 | 9 | | 1398 |
| PSM | ATNITPKHNM | 49 | 10 | | 1399 |
| PAP | ATQIPSYKKL | 274 | 10 | | 1400 |
| PAP | ATQIPSYKKLI | 274 | 11 | | 1401 |
| PSM | AVATARKPRW | 11 | 10 | | 1402 |
| PSM | AVATARRPRWL | 11 | 11 | | 1403 |
| PSM | AVEPDRYVI | 365 | 9 | | 1404 |
| PSM | AVEPDRYVIL | 365 | 10 | | 1405 |
| PSM | AVKNFTEI | 635 | 8 | | 1406 |
| Kallikrein | AVPLTQSRI | 17 | 9 | | 1407 |
| PSM | AVVHEIVRSF | 393 | 10 | | 1408 |
| PSM | AVVLRKYADKI | 601 | 11 | | 1409 |
| Kallikrein | AVYTKVVHY | 241 | 9 | | 1410 |
| PSM | AWGEVKRQI | 724 | 9 | | 1411 |
| PSM | AWGEVKRQIY | 724 | 10 | | 1412 |
| PSM | AYINADSSI | 448 | 9 | 0.0190 | 1413 |
| Kallikrein | AYSEKVTEF | 187 | 9 | | 1414 |
| Kallikrein | AYSEKVTEFM | 187 | 10 | | 1415 |
| Kallikrein | AYSEKVTEFML | 187 | 11 | | 1416 |
| PSA | CIRNKSVI | 62 | 8 | | 1417 |
| PSA | CIRNKSVIL | 62 | 9 | | 1418 |
| PSA | CIRNKSVILL | 62 | 10 | | 1419 |
| Kallikrein | CLKKNSQVW | 66 | 9 | | 1420 |
| Kallikrein | CLKKNSQVWL | 66 | 10 | | 1421 |
| Kallikrein | CTGAVPLI | 14 | 8 | | 1422 |
| PSM | CTPLMYSL | 466 | 8 | | 1423 |
| Kallikrein | CVSLHLLSNDM | 173 | 11 | | 1424 |
| Kallikrein | CYASGWGSI | 152 | 9 | 0.1700 | 1425 |
| PSA | CYASGWGSI | 148 | 9 | 0.1700 | 1426 |
| PSM | DFDKSNPI | 652 | 8 | | 1427 |
| PSM | DFDKSNPIVL | 652 | 10 | | 1428 |
| PSM | DFEVFFQRL | 520 | 9 | | 1429 |
| PSM | DFEVFFQRLGI | 520 | 11 | | 1430 |
| PSM | DFFKLERDM | 184 | 9 | | 1431 |
| PSM | DFFKLERDMKI | 184 | 11 | | 1432 |
| PAP | DFIATLGKL | 186 | 9 | 0.0002 | 1433 |
| PSM | DIVPPFSAF | 156 | 9 | | 1434 |
| PAP | DLFGIWSKVY | 201 | 10 | | 1435 |
| PSA | DLPTQEPAL | 136 | 9 | | 1436 |
| Kallikrein | DLVLSIAL | 3 | 8 | | 1437 |
| PSM | DMKINCSGKI | 191 | 10 | | 1438 |
| PSA | DMSLLKNRF | 98 | 9 | 0.0001 | 1439 |
| PSA | DMSLLKNRFL | 98 | 10 | | 1440 |
| Kallikrein | DTCGGDSGGPL | 207 | 11 | | 1441 |
| PAP | DTFPTDPI | SI | 8 | | 1442 |
| PAP | DTMTKLREL | 230 | 9 | | 1443 |
| PAP | DTTVSGLQM | 290 | 9 | | 1444 |
| PAP | DTTVSGLQMAL | 290 | 11 | | 1445 |
| PAP | DVDRTLMSAM | 108 | 10 | | 1446 |
| Kallikrein | DVVKVLGL | 134 | 8 | | 1447 |
| PAP | DVYNGLLPPY | 301 | 10 | | 1448 |
| PSM | DYAVVLRKY | 599 | 9 | | 1449 |
| PSM | DYFAPGVKSY | 233 | 10 | | 1450 |
| PSM | EFGLDSVEL | 102 | 9 | | 1451 |
| PSM | EFGLLGSTEW | 425 | 10 | | 1452 |
| Kallikrein | EFLRPRSL | 164 | 8 | | 1453 |
| PSA | EFLTPKKL | 160 | 8 | | 1454 |
| Kallikrein | EFMLCAGL | 194 | 8 | | 1455 |
| Kallikrein | EFMLCAGLW | 194 | 9 | | 1456 |
| PAP | EFQKRLHPY | 176 | 9 | | 1457 |
| PSM | EFSGMPRI | 505 | 8 | | 1458 |
| PSM | EFSGMPRISKL | 505 | 11 | | 1459 |
| PSM | EIASKFSERL | 641 | 10 | | 1460 |
| PSM | EIFNTSLF | 137 | 8 | | 1461 |
| PSM | EIVRSFGTL | 397 | 9 | | 1462 |
| PSM | ELAHYDVL | 109 | 8 | | 1463 |
| PSM | ELAHYDVLL | 109 | 9 | | 1464 |
| PSM | ELAHYDVLLSY | 109 | 11 | | 1465 |
| PSM | ELANSIYL | 586 | 8 | | 1466 |
| PSM | ELANSIVLPF | 586 | 10 | | 1467 |
| PAP | ELGEYIRKRY | 80 | 10 | | 1468 |
| PSM | ELKAENIKKF | 64 | 10 | | 1469 |
| PSM | ELKAENIKKFL | 64 | 11 | | 1470 |
| PAP | ELKFVTLVF | 34 | 9 | | 1471 |
| PSM | ELKSPDEGF | 480 | 9 | | 1472 |
| PAP | ELSELSLL | 237 | 8 | | 1473 |
| PAP | ELSELSLLSL | 237 | 10 | | 1474 |
| PAP | ELSELSLLSLY | 237 | 11 | | 1475 |
| PAP | ELSLLSLY | 240 | 8 | | 1476 |
| PAP | ELSLLSLYGI | 240 | 10 | | 1477 |
| PSA | ELTDAVKVM | 127 | 9 | | 1478 |
| PSA | ELTDAVKVMDL | 127 | 11 | | 1479 |
| PSM | ELVEKFYDPM | 560 | 10 | | 1480 |
| PSM | ELVEKFYDPMF | 560 | 11 | | 1481 |
| PAP | ELVGPVIPQDW | 358 | 11 | | 1482 |
| PAP | ELYFEKGEY | 317 | 9 | | 1483 |
| PAP | ELYFEKGEYF | 317 | 10 | | 1484 |
| PSM | EMKTYSVSF | 621 | 9 | 0.0010 | 1485 |
| PAP | ETLKSEEF | 170 | 8 | | 1486 |
| PSM | ETNKFSGY | 542 | 8 | | 1487 |
| PSM | ETNKFSGYPL | 542 | 10 | | 1488 |
| PSM | ETNKFSGYPLY | 542 | 11 | | 1489 |
| PAP | ETQHEPYPL | 334 | 9 | | 1490 |
| PAP | ETQHEPYPLM | 334 | 10 | | 1491 |
| PAP | ETQHEPYPLML | 334 | 11 | | 1492 |
| PSM | ETYELVEKF | 557 | 9 | | 1493 |
| PSM | ETYELVEKFY | 557 | 10 | | 1494 |
| PSM | EVFFQRLGI | 522 | 9 | | 1495 |
| PSM | EVKRQIYVAAF | 727 | 11 | | 1496 |
| PSM | EVTRIYNVI | 351 | 9 | | 1497 |
| PSM | EWAEENSRL | 433 | 9 | | 1498 |
| PSM | EWAEENSRLL | 433 | 10 | | 1499 |
| PSM | EYAYRRGI | 276 | 8 | | 1500 |
| PAP | EYFVEMYY | 324 | 8 | | 1501 |
| PAP | EYIRKRYRKF | 83 | 10 | 0.0067 | 1502 |
| PAP | EYIRKRYRKYL | 83 | 11 | | 1503 |
| PSM | FFKLERDM | 185 | 8 | | 1504 |
| PSM | FFKLERDMKI | 185 | 10 | | 1505 |
| PSM | FFLLGFLF | 32 | 8 | | 1506 |
| PSM | FFLLGFLFGW | 32 | 10 | 0.0026 | 1507 |
| PSM | FFLLGFLFGWF | 32 | 11 | | 1508 |
| PAP | FFWLDRSVL | 23 | 9 | 0.0017 | 1509 |
| PAP | FIATLGKL | 187 | 8 | | 1510 |
| PAP | FIATLGKLSGL | 187 | 11 | | 1511 |
| PSM | FIKSSNEATNI | 42 | 11 | | 1512 |
| PSM | FLDELKAENI | 61 | 10 | | 1513 |
| PSM | FLERAFIDPL | 670 | 10 | | 1514 |
| PAP | FLFLLFFW | 18 | 8 | | 1515 |
| PAP | FLFLLFFWL | 18 | 9 | | 1516 |
| PAP | FLFLLFFWL | 33 | 9 | | 1517 |
| PSM | FLLGFLFGWF | 33 | 10 | | 1518 |
| PSM | FLLGFLFGWFI | 33 | 11 | | 1519 |
| PSA | FLTLSVTW | 3 | 8 | | 1520 |
| PSA | FLTLSVTWI | 3 | 9 | | 1521 |
| PSM | FLYNFTQI | 73 | 8 | | 1522 |
| PSM | FLYNFTQIPHL | 73 | 11 | | 1523 |
| Kallikrein | FMLCAGLW | 195 | 8 | | 1524 |
| PSA | FMLCAGRW | 191 | 8 | | 1525 |
| PSM | FTEIASKF | 639 | 8 | | 1526 |
| PSM | FTVQAAAETL | 737 | 10 | | 1527 |
| PAP | FWLDRSVL | 24 | 8 | | 1528 |
| PSM | FYDPMFKY | 565 | 8 | | 1529 |
| PSM | FYDPMFKYHL | 565 | 10 | 1.1000 | 1530 |
| PSM | GFEGKSLY | 487 | 8 | | 1531 |
| PSM | GFEGKSLYESW | 487 | 11 | | 1532 |
| PSM | GFFLLGFL | 31 | 8 | | 1533 |
| PSM | GFFLLGFLF | 31 | 9 | 0.0190 | 1534 |
| PSM | GFFLLGFLFGW | 31 | 11 | | 1535 |
| PAP | GFGQLTQL | 66 | 8 | | 1536 |
| PAP | GFGQLTQLGM | 66 | 10 | | 1537 |
| PSM | GFLFGWFI | 36 | 8 | | 1538 |
| PAP | GFLFLLFF | 17 | 8 | | 1539 |
| PAP | GFLFLLFFW | 17 | 9 | 0.0016 | 1540 |
| PAP | GFLFLLFFWL | 17 | 10 | 0.0007 | 1541 |
| PSM | GIAEAVGL | 282 | 8 | | 1542 |
| PSM | GIAEAVGLPSI | 282 | 11 | | 1543 |
| PSM | GIASGRARY | 529 | 9 | | 1544 |
| PAP | GIHKQKEKSRL | 248 | 11 | | 1545 |
| PAP | GIWSKVYDPL | 204 | 10 | | 1546 |
| PAP | GIWSKVYDPLY | 204 | 11 | | 1547 |
| PSM | GIYDALFDI | 707 | 9 | | 1548 |
| PSM | GLDSVELAHY | 104 | 10 | | 1549 |
| PAP | GLHGQDLF | 196 | 8 | | 1550 |
| PAP | GLHGQDLFGI | 196 | 10 | | 1551 |
| PAP | GLHGQDLFGIW | 196 | 11 | | 1552 |
| PSM | GLLGSTEW | 427 | 8 | | 1553 |
| PAP | GLLPPYASCHL | 305 | 11 | | 1554 |
| PSM | GLPDRPFY | 680 | 8 | | 1555 |
| PSM | GLPSIPVHPI | 288 | 10 | | 1556 |
| Kallikrein | GLPTQEPAL | 140 | 9 | | 1557 |
| PAP | GLQMALDVY | 295 | 9 | | 1558 |
| PAP | GMEQHYEL | 74 | 8 | | 1559 |
| PAP | GMEQHYELGEY | 74 | 11 | | 1560 |
| PSM | GMPEGDLVY | 168 | 9 | | 1561 |
| PSM | GMPRISKL | 508 | 8 | | 1562 |
| PSM | GMVFELANSI | 582 | 10 | 0.0002 | 1563 |
| PSM | GTEQNFQL | 85 | 8 | | 1564 |
| PSM | GTLKKEGW | 403 | 8 | | 1565 |
| Kallikrein | GTTCYASGW | 149 | 9 | | 1566 |
| PSA | GTTCYASGW | 145 | 9 | | 1567 |
| PSM | GVAYINADSSI | 446 | 11 | | 1568 |
| PSM | GVILYSDPADY | 224 | 11 | | 1569 |
| PSM | GVKSYPDGW | 238 | 9 | | 1570 |
| PSM | GVKSYPDGWNL | 238 | 11 | | 1571 |
| Kallikrein | GVLQGITSW | 221 | 9 | | 1572 |
| PSA | GVLQGITSW | 217 | 9 | | 1573 |
| Kallikrein | GVLVHPQW | 52 | 8 | | 1574 |
| PSA | GVLVHPQW | 48 | 8 | | 1575 |
| Kallikrein | GVLVHPQWVL | 52 | 10 | | 1576 |
| PSA | GVLVHPQWVL | 48 | 10 | | 1577 |
| PAP | GVLVNEIL | 261 | 8 | | 1578 |
| PAP | GVLVNEILNHM | 261 | 11 | | 1579 |
| PSM | GVQRGNIL | 252 | 8 | | 1580 |
| PSM | GVQRGNILNL | 252 | 10 | | 1581 |
| PAP | GVSIWNPI | 128 | 8 | | 1582 |
| PAP | GVSIWNPIL | 128 | 9 | | 1583 |
| PAP | GVSIWNPILL | 128 | 10 | | 1584 |
| PAP | GVSIWNPILLW | 128 | 11 | | 1585 |
| Kallikrein | GWAHCGGVL | 46 | 9 | | 1586 |
| Kallikrein | GWECEKHSQPW | 28 | 11 | | 1587 |
| PSA | GWECEKHSQPW | 24 | 11 | | 1588 |
| Kallikrein | GWGSIEPEEF | 156 | 10 | 0.0001 | 1589 |
| PSA | GWGSIEPEEF | 152 | 10 | 0.0001 | 1590 |
| Kallikrein | GWGSIEPEEFL | 156 | 11 | | 1591 |
| PSA | GWGSIEPEEFL | 152 | 11 | | 1592 |
| PSM | GWRPRRTI | 409 | 8 | | 1593 |
| PSM | GWRPRRTIL | 409 | 9 | | 1594 |
| PSM | GWRPRRTILF | 409 | 10 | 0.0540 | 1595 |
| PSM | GYENVSDI | 150 | 8 | | 1596 |
| PSM | GYPANEYAY | 271 | 9 | | 1597 |
| PSM | GYPLYHSVY | 548 | 9 | | 1598 |
| PSM | GYYDAQKL | 298 | 8 | | 1599 |
| PSM | GYYDAQKLL | 298 | 9 | | 1600 |
| PSM | HIHSTNEVTRI | 345 | 11 | | 1601 |
| PSM | HLAGTEQNF | 82 | 9 | | 1602 |
| PSM | HLAGTEQNFQL | 82 | 11 | | 1603 |
| PSM | HLTVAQVRGGM | 573 | 11 | | 1604 |
| PAP | HMKRATQI | 270 | 8 | | 1605 |
| PAP | HMKRATQIPSY | 270 | 11 | | 1606 |
| PAP | HTVPLSEDQL | 144 | 10 | | 1607 |
| PAP | HTVPLSEDQLL | 144 | 11 | | 1608 |
| PSM | HYDVLLSY | 112 | 8 | | 1609 |
| PAP | HYELGEYI | 78 | 8 | | 1610 |
| Kallikrein | HYRKWIKDTI | 248 | 10 | 0.0550 | 1611 |
| PSA | HYRKWIKDTI | 244 | 10 | 0.0550 | 1612 |
| PSM | IINEDGNEI | 130 | 9 | | 1613 |
| PSM | IINEDGNEIF | 130 | 10 | | 1614 |
| PSM | ILFASWDAEEF | 416 | 11 | | 1615 |
| PSM | ILGGHRDSW | 373 | 9 | | 1616 |
| PSM | ILGGHRDSWVF | 373 | 11 | | 1617 |
| PSA | ILLGRHSL | 69 | 8 | | 1618 |
| PSA | ILLGRHSLF | 69 | 9 | | 1619 |
| PAP | ILNHMKRATQI | 267 | 11 | | 1620 |
| PSM | ILNLNGAGDPL | 258 | 11 | | 1621 |
| PSA | ILSRIVGGW | 17 | 9 | | 1622 |
| PSM | ILYSDPADY | 226 | 9 | | 1623 |
| PSM | ILYSDPADYF | 226 | 10 | | 1624 |
| Kallikrein | ITDVVKVL | 132 | 8 | | 1625 |
| Kallikrein | ITDVVKVLGL | 132 | 10 | | 1626 |
| PSM | ITPKHNMKAF | 52 | 10 | | 1627 |
| PSM | ITPKHNMKAFL | 52 | 11 | | 1628 |
| Kallikrein | ITSWGPEPCAL | 226 | 11 | | 1629 |
| PSA | ITSWGSEPCAL | 222 | 11 | | 1630 |
| PSM | IVIARYGKVF | 200 | 10 | | 1631 |
| PSM | IVLPFDCRDY | 591 | 10 | | 1632 |
| PSM | IVLRMMNDQL | 659 | 10 | | 1633 |
| PSM | IVLRMMNDQLM | 659 | 11 | | 1634 |
| PSM | IVPPFSAF | 157 | 8 | | 1635 |
| PSM | IVRSFGTL | 398 | 8 | | 1636 |
| PAP | IWNPILLW | 131 | 8 | | 1637 |
| PAP | IWNPILLWQPI | 131 | 11 | | 1638 |
| PAP | IWSKVYDPL | 205 | 9 | 0.0024 | 1639 |
| PAP | IWSKVYDPLY | 205 | 10 | | 1640 |
| PSM | IYAPSSHNKY | 691 | 10 | | 1641 |
| PSM | IYDALFDI | 708 | 8 | | 1642 |
| PSM | IYNVIGTL | 355 | 8 | | 1643 |
| PSM | KFLYNFTQI | 72 | 9 | | 1644 |
| PSA | KFMLCAGRW | 190 | 9 | 0.0310 | 1645 |
| PSM | KFSERLQDF | 645 | 9 | | 1646 |
| PSM | KFSGYPLY | 545 | 8 | | 1647 |
| PSM | KFYDPMFKY | 564 | 9 | | 1648 |
| PSM | KFYDPMFKYHL | 564 | 11 | | 1649 |
| PSM | KINCSGKI | 193 | 8 | | 1650 |
| PSM | KINCSGKIVI | 193 | 10 | | 1651 |
| Kallikrein | KITDVVKVL | 131 | 9 | | 1652 |
| Kallikrein | KITDVVKVLGL | 131 | 11 | | 1653 |
| PSM | KIVIARYGKVF | 199 | 11 | | 1654 |
| PSM | KLERDMKI | 187 | 8 | | 1655 |
| PSM | KLGSGNDF | 514 | 8 | | 1656 |
| PSM | KLGSGNDFEVF | 514 | 11 | | 1657 |
| PSA | KLQCVDLHVI | 166 | 10 | | 1658 |
| PAP | KLRELSEL | 234 | 8 | | 1659 |
| PAP | KLRELSELSL | 234 | 10 | | 1660 |
| PAP | KLRELSELSLL | 234 | 11 | | 1661 |
| PAP | KLSGLHGQDL | 193 | 10 | | 1662 |
| PAP | KLSGLHGQDLF | 193 | 11 | | 1663 |
| PSM | KTHPNYISI | 122 | 9 | | 1664 |
| PSM | KTHPNYISII | 122 | 10 | | 1665 |
| PSM | KTYSVSFDSL | 623 | 10 | | 1666 |
| PSM | KTYSVSFDSLF | 623 | 11 | | 1667 |
| PSM | KVDPSKAW | 718 | 8 | | 1668 |
| PSM | KVPYNVGPGF | 324 | 10 | | 1669 |
| Kallikrein | KVTEFMLCAGL | 191 | 11 | | 1670 |
| Kallikrein | KVVHYRKW | 245 | 8 | | 1671 |
| PSA | KVVHYRKW | 241 | 8 | | 1672 |
| Kallikrein | KVVHYRKWI | 245 | 9 | | 1673 |
| PSA | KVVHYRKWI | 241 | 9 | | 1674 |
| PSM | KYADKIYSI | 606 | 9 | 12.0000 | 1675 |
| PSM | KYADKIYSISM | 606 | 11 | | 1676 |
| PSM | KYAGESFPGI | 699 | 10 | | 1677 |
| PSM | KYAGESFPGIY | 699 | 11 | | 1678 |
| PSM | LFASWDAEEF | 417 | 10 | | 1679 |
| PSM | LFEPPPPGY | 143 | 9 | | 1680 |
| PAP | LFFWLDRSVL | 22 | 10 | 0.0045 | 1681 |
| PAP | LFGIWSKVY | 202 | 9 | | 1682 |
| PSA | LFRPEDTGQVF | 76 | 11 | | 1683 |
| PAP | LFLLFFWL | 19 | 8 | | 1684 |
| PAP | LFPPEGVSI | 123 | 9 | 0.0033 | 1685 |
| PAP | LFPPEGVSIW | 123 | 10 | 0.0140 | 1686 |
| PSM | LFSAVKNF | 632 | 8 | | 1687 |
| PSM | LFSAVKNFTEI | 632 | 11 | | 1688 |
| PSA | LILSRIVGGW | 16 | 10 | | 1689 |
| Kallikrein | LIQSRIVGGW | 20 | 10 | | 1690 |
| PAP | LLARAASL | 7 | 8 | | 1691 |
| PAP | LLARAASLSL | 7 | 10 | | 1692 |
| PAP | LLFFWLDRSVL | 21 | 11 | | 1693 |
| PSM | LLGFLFGW | 34 | 8 | | 1694 |
| PSM | LLGFLFGWF | 34 | 9 | | 1695 |
| PSM | LLGFLFGWFI | 34 | 10 | | 1696 |
| PSA | LLGRHSLF | 70 | 8 | | 1697 |
| PAP | LLLARAASL | 6 | 9 | | 1698 |
| PAP | LLLARAASLSL | 6 | 11 | | 1699 |
| PAP | LLPPYASCHL | 306 | 10 | | 1700 |
| PSM | LLQERGVAY | 441 | 9 | | 1701 |
| PSM | LLQERGVAYI | 441 | 10 | | 1702 |
| PSA | LLRLSEPAEL | 119 | 10 | | 1703 |
| Kallikrein | LLRLSEPAKT | 123 | 10 | | 1704 |
| Kallikrein | LLSNDMCARAY | 178 | 11 | | 1705 |
| PSM | LMFLERAF | 668 | 8 | | 1706 |
| PSM | LMFLERAFI | 668 | 9 | 0.0075 | 1707 |
| PAP | LMSAMTNL | 113 | 8 | | 1708 |
| PAP | LMSAMTNLAAL | 113 | 11 | | 1709 |
| PSM | LMYSLVHNL | 469 | 9 | | 1710 |
| PSA | LTDAVKVM | 128 | 8 | | 1711 |
| PSA | LTDAVKVMDL | 128 | 10 | | 1712 |
| PAP | LTELYFEKGEY | 315 | 11 | | 1713 |
| PSA | LTLSVTWI | 4 | 8 | | 1714 |
| PSM | LTPGYPANEY | 268 | 10 | | 1715 |
| PSA | LTPKKLQCVDL | 162 | 11 | | 1716 |
| PAP | LTQLGMEQHY | 70 | 10 | 0.0022 | 1717 |
| PSM | LTVAQVRGGM | 574 | 10 | | 1718 |
| Kallikrein | LVCNGVLQGI | 217 | 10 | | 1719 |
| PSA | LVCNGVLQGI | 213 | 10 | | 1720 |
| PSM | LVEKFYDPM | 561 | 9 | | 1721 |
| PSM | LVEKEYDPMF | 561 | 10 | | 1722 |
| PAP | LVFRHGDRSPI | 40 | 11 | | 1723 |
| PAP | LVGPVIPQDW | 359 | 10 | | 1724 |
| PSM | LVHNLTKEL | 473 | 9 | | 1725 |
| Kallikrein | LVHPQWVL | 54 | 8 | | 1726 |
| PSA | LVHPQWVL | 50 | 8 | | 1727 |
| PSM | LVLAGGFF | 26 | 8 | | 1728 |
| PSM | LVLAGGFFL | 26 | 9 | | 1729 |
| PSM | LVLAGGFFLL | 26 | 10 | | 1730 |
| PAP | LVNETLNHM | 263 | 9 | | 1731 |
| PAP | LYCESVHNF | 213 | 9 | 0.4400 | 1732 |
| PAP | LYCESVHNFTL | 213 | 11 | | 1733 |
| PSA | LYDMSLLKNRF | 96 | 11 | 0.1200 | 1734 |
| PAP | LYFEKGEY | 318 | 8 | | 1735 |
| PAP | LYFEKGEYF | 318 | 9 | 2.5000 | 1736 |
| PSM | LYHSVYETY | 551 | 9 | | 1737 |
| PSM | LVHSVYETYEL | 551 | 11 | | 1738 |
| PAP | LYLPFRNCPRF | 154 | 11 | | 1739 |
| PSM | LYNFTQIPHL | 74 | 10 | 0.2300 | 1740 |
| PSM | LYSDPADY | 227 | 8 | | 1741 |
| PSM | LYSDPADYF | 227 | 9 | 0.4400 | 1742 |
| PSA | LYTKVVHY | 238 | 8 | | 1743 |
| PSA | LYTKVVHYRKW | 238 | 11 | | 1744 |
| PSM | MFLERAFI | 669 | 8 | | 1745 |
| PSM | MFLERAFIDPL | 669 | 11 | | 1746 |
| PSA | MLLRLSEPAEL | 118 | 11 | | 1747 |
| Kallikrein | MLLRLSEPAKI | 122 | 11 | | 1748 |
| PAP | MLPGCSPSCPL | 343 | 11 | | 1749 |
| PSM | MMNDQLMF | 663 | 8 | | 1750 |
| PSM | MMNDQLMFL | 663 | 9 | | 1751 |
| PAP | MTKLRELSEL | 232 | 10 | | 1752 |
| PAP | MTNLAALF | 117 | 8 | | 1753 |
| PSM | MVFELANSI | 583 | 9 | | 1754 |
| PSM | MVFELANSIVL | 583 | 11 | | 1755 |
| Kallikrein | MWDLVLSI | 1 | 8 | | 1756 |
| Kallikrein | MWDLVLSIAL | 1 | 10 | | 1757 |
| PSM | MYSLVHNL | 470 | 8 | | 1758 |
| PSM | NFQLAKQI | 89 | 8 | | 1759 |
| PSM | NFSTQKVKM | 336 | 9 | | 1760 |
| PSM | NFSTQKVKMHI | 336 | 11 | | 1761 |
| PSM | NFTEIASKF | 638 | 9 | 0.0001 | 1762 |
| PSM | NFTQIPHL | 76 | 8 | | 1763 |
| PSM | NIKKFLYNF | 69 | 9 | | 1764 |
| PSM | NITPKHNM | 51 | 8 | | 1765 |
| PSM | NITPKHNMKAF | 51 | 11 | | 1766 |
| PSM | NLNGAGDPL | 260 | 9 | | 1767 |
| PSM | NMKAFLDEL | 57 | 9 | | 1768 |
| Kallikrein | NMSLLKHQSL | 102 | 10 | | 1769 |
| PSM | NVGPGFTGNF | 328 | 10 | | 1770 |
| PSM | NVSDIVPPF | 153 | 9 | | 1771 |
| PSM | NWETNKFSGY | 540 | 10 | | 1772 |
| PSM | NYARTEDE | 178 | 8 | | 1773 |
| PSM | NYARTEDEF | 178 | 9 | 0.7700 | 1774 |
| PSM | NYARTEDFFKL | 178 | 11 | | 1775 |
| PSM | NYTLRVDCTPL | 459 | 11 | | 1776 |
| PSM | PFDCRDYAVVL | 594 | 11 | | 1777 |
| PAP | PFRNCPRF | 157 | 8 | | 1778 |
| PAP | PFRNCPRFQEL | 157 | 11 | | 1779 |
| PSM | PFSAFSPQGM | 160 | 10 | | 1780 |
| PSM | PFYRHVIY | 685 | 8 | | 1781 |
| PAP | PIDTFPTDPI | 49 | 10 | | 1782 |
| PSM | PIGYYDAQKL | 296 | 10 | | 1783 |
| PSM | PIGYYDAQKLL | 296 | 11 | | 1784 |
| PAP | PIKESSWPQGF | 57 | 11 | | 1785 |
| PAP | PILLWQPI | 134 | 8 | | 1786 |
| PAP | PIPVHTVPL | 140 | 9 | | 1787 |
| PSM | PIVLRMMNDQL | 658 | 11 | | 1788 |
| PAP | PLERFAEL | 352 | 8 | | 1789 |
| PSM | PLGLPDRPF | 678 | 9 | | 1790 |
| PSM | PLGLPDRPFY | 678 | 10 | | 1791 |
| PSA | PLILSRIVGGW | 15 | 11 | | 1792 |
| Kallikrein | PLIQSRIVGGW | 19 | 11 | | 1793 |
| PAP | PLLLARAASL | 5 | 10 | | 1794 |
| PSM | PLMYSLVHNL | 468 | 10 | | 1795 |
| PAP | PLSEDQLL | 147 | 8 | | 1796 |
| PAP | PLSEDQLLY | 147 | 9 | | 1797 |
| PAP | PLSEDQLLYL | 147 | 10 | | 1798 |
| PSM | PLTPGYPANEY | 267 | 11 | | 1799 |
| Kallikrein | PLVCNGVL | 216 | 8 | | 1800 |
| PSA | PLVCNGVL | 212 | 8 | | 1801 |
| Kallikrein | PLVCNGVLQGI | 216 | 11 | | 1802 |
| PSA | PLVCNGVLQGI | 212 | 11 | | 1803 |
| PAP | PLYCESVHNF | 212 | 10 | | 1804 |
| PSA | PLYDMSLL | 95 | 8 | | 1805 |
| PSM | PLYHSVYETY | 550 | 10 | | 1806 |
| Kallikrein | PLYNMSLL | 99 | 8 | | 1807 |
| PAP | PTDPIKESSW | 54 | 10 | | 1808 |
| PSM | PVHPIGYY | 293 | 8 | | 1809 |
| Kallikrein | PVSHSFPHPL | 91 | 10 | | 1810 |
| Kallikrein | PVSHSFPHPLY | 91 | 11 | | 1811 |
| Kallikrein | PWQVAVYSHGW | 37 | 11 | | 1812 |
| PAP | PYASCHLTEL | 309 | 10 | 0.0240 | 1813 |
| PAP | PYASCHLTELY | 309 | 11 | | 1814 |
| PAP | PYKDFIATL | 183 | 9 | 0.1100 | 1815 |
| PSM | PYNVGPGF | 326 | 8 | | 1816 |
| PAP | QIPSYKKL | 276 | 8 | | 1817 |
| PAP | QIPSYKKLI | 276 | 9 | | 1818 |
| PAP | QIPSYKKLIM | 276 | 10 | | 1819 |
| PAP | QIPSYKKLIMY | 276 | 11 | | 1820 |
| PSM | QIQSQWKEF | 95 | 9 | | 1821 |
| PSM | QIQSQWKEFGL | 95 | 11 | | 1822 |
| PSM | QLAGAKGVI | 218 | 9 | | 1823 |
| PSM | QLAGAKGVIL | 218 | 10 | | 1824 |
| PSM | QLAGAKGVILY | 218 | 11 | | 1825 |
| PSM | QLAKQIQSQW | 91 | 10 | | 1826 |
| PAP | QLGMEQHY | 72 | 8 | | 1827 |
| PAP | QLGMEQHYEL | 72 | 10 | | 1828 |
| PSM | QLMFLERAF | 667 | 9 | | 1829 |
| PSM | QLMFLERAFI | 667 | 10 | | 1830 |
| PAP | QLTQLGMEQHY | 69 | 11 | | 1831 |
| PAP | QMALDVYNGL | 297 | 10 | 0.0001 | 1832 |
| PAP | QMALDVYNGLL | 297 | 11 | | 1833 |
| Kallikrein | QVAVYSHGW | 39 | 9 | | 1834 |
| PSA | QVFQVSHSF | 84 | 9 | | 1835 |
| PSA | QVHPQKVTKF | 182 | 10 | | 1836 |
| PSA | QVHPQKVTKFM | 182 | 11 | | 1837 |
| PSM | QVRGGMVF | 578 | 8 | | 1838 |
| PSM | QVRGGMVFEL | 578 | 10 | | 1839 |
| PSA | QVSHSFPHPL | 87 | 10 | | 1840 |
| PSA | QVSHSFPHPLY | 87 | 11 | | 1841 |
| Kallikrein | QVWLGRHNL | 72 | 9 | | 1842 |
| Kallikrein | QVWLGRFINLF | 72 | 10 | | 1843 |
| PSA | QWVLTAAHCI | 54 | 10 | 0.0007 | 1844 |
| Kallikrein | QWVLTAAHCL | 58 | 10 | | 1845 |
| PAP | RFAELVGPVI | 355 | 10 | 0.0037 | 1846 |
| PAP | RFQELESETL | 163 | 10 | 0.0001 | 1847 |
| PSM | RISKLGSGNDF | 511 | 11 | | 1848 |
| PSM | RIYNVIGTL | 354 | 9 | | 1849 |
| PSM | RLGIASGRARY | 527 | 11 | | 1850 |
| PAP | RLHPYKDF | 180 | 8 | | 1851 |
| PAP | RLHPYKDFI | 180 | 9 | | 1852 |
| PSM | RLLQERGVAY | 440 | 10 | | 1853 |
| PSM | RLLQERGVAYI | 440 | 11 | | 1854 |
| PSM | RLQDFDKSNPI | 649 | 11 | | 1855 |
| PAP | RLQGGVLVNEI | 257 | 11 | | 1856 |
| PSA | RLSEPAEL | 121 | 8 | | 1857 |
| Kallikrein | RLSEPAKI | 125 | 8 | | 1858 |
| PSM | RMMNDQLM | 662 | 8 | | 1859 |
| PSM | RMMNDQLMF | 662 | 9 | | 1860 |
| PSM | RMMNDQLMFL | 662 | 10 | | 1861 |
| PSM | RTEDFFKL | 181 | 8 | | 1862 |
| PSM | RTILFASW | 414 | 8 | | 1863 |
| PAP | RTLMSAMTNL | 111 | 10 | | 1864 |
| PSM | RVDCTPLM | 463 | 8 | | 1865 |
| PSM | RVDCTPLMY | 463 | 9 | | 1866 |
| PSM | RVDCTPLMYSL | 463 | 11 | | 1867 |
| Kallikrein | RVPVSHSF | 89 | 8 | | 1868 |
| PSM | RWLCAGAL | 19 | 8 | | 1869 |
| PSM | RWLCAGALVL | 19 | 10 | | 1870 |
| PAP | RYRKFLNESY | 88 | 10 | 0.0057 | 1871 |
| PSM | RYTKNWETNKF | 536 | 11 | | 1872 |
| PSM | SFGTLKKEGW | 401 | 10 | | 1873 |
| PSM | SFPGIYDAL | 704 | 9 | | 1874 |
| PSM | SFPGIYDALF | 704 | 10 | | 1875 |
| PSA | SFPHPLYDM | 91 | 9 | 0.0007 | 1876 |
| PSA | SFPHPLYDMSL | 91 | 11 | | 1877 |
| Kallikrein | SFPHPLYNM | 95 | 9 | | 1878 |
| Kallikrein | SFPHPLYNMSL | 95 | 11 | | 1879 |
| PSM | SIEGNYTL | 455 | 8 | | 1880 |
| Kallikrein | SIEPEEFL | 159 | 8 | | 1881 |
| PSA | SIEPEEFL | 155 | 8 | | 1882 |
| PSM | SIINEDGNEI | 129 | 10 | | 1883 |
| PSM | SIINEDGNEIF | 129 | 11 | | 1884 |
| PSM | SIPVHPIGY | 291 | 9 | | 1885 |
| PSM | SIPVHPIGYY | 291 | 10 | | 1886 |
| PSM | SISMKHPQEM | 613 | 10 | | 1887 |
| PSM | SIVLPFDCRDY | 590 | 11 | | 1888 |
| PAP | SIWNPILL | 130 | 8 | | 1889 |
| PAP | SIWNPILLW | 130 | 9 | | 1890 |
| PSM | SLFEPPPPGY | 142 | 10 | | 1891 |
| PSM | SLFSAVKNF | 631 | 9 | | 1892 |
| PAP | SLGFLFLL | 15 | 8 | | 1893 |
| PAP | SLGFLFLLF | 15 | 9 | | 1894 |
| PAP | SLGFLPLLFF | 15 | 10 | | 1895 |
| PAP | SLGFLFLLFFW | 15 | 11 | | 1896 |
| Kallikrein | SLHLLSNDM | 175 | 9 | | 1897 |
| Kallikrein | SLLKHQSL | 104 | 8 | | 1898 |
| PSA | SLLKNRFL | 100 | 8 | | 1899 |
| PAP | SLLSLYGI | 242 | 8 | | 1900 |
| Kallikrein | SLQCVSLHL | 170 | 9 | | 1901 |
| Kallikrein | SLQCVSLHLL | 170 | 10 | | 1902 |
| PAP | SLSLGFLF | 13 | 8 | | 1903 |
| PAP | SLSLGFLFL | 13 | 9 | | 1904 |
| PAP | SLSLGFLFLL | 13 | 10 | | 1905 |
| PAP | SLSLGFLFLLF | 13 | 11 | | 1906 |
| PSM | SLVHNLTKEL | 472 | 10 | | 1907 |
| PSA | SLYTKVVHY | 237 | 9 | | 1908 |
| PSM | SMKHPQEM | 615 | 8 | | 1909 |
| PSM | SMKHPQEMKTY | 615 | 11 | | 1910 |
| PSA | STCSGDSGGPL | 203 | 11 | | 1911 |
| PAP | STDVDRTL | 106 | 8 | | 1912 |
| PAP | STDVDRTLM | 106 | 9 | | 1913 |
| PSM | STEWAEENSRL | 431 | 11 | | 1914 |
| PSM | STNEVTRI | 348 | 8 | | 1915 |
| PSM | STNEVTRIY | 348 | 9 | | 1916 |
| PSM | STQKVKMHI | 338 | 9 | | 1917 |
| PSM | SVELAHYDVL | 107 | 10 | | 1918 |
| PSM | SVELAHYDVLL | 107 | 11 | | 1919 |
| Kallikrein | SVGCTGAVPL | 11 | 10 | | 1920 |
| Kallikrein | SVGCTGAVPLI | 11 | 11 | | 1921 |
| PAP | SVHNFTLPSW | 217 | 10 | | 1922 |
| PSA | SVILLGRHSL | 67 | 10 | | 1923 |
| PSA | SVILLGRHSLF | 67 | 11 | | 1924 |
| PAP | SVLAKELKF | 29 | 9 | | 1925 |
| PSM | SVSFDSLF | 626 | 8 | | 1926 |
| PSA | SVTWIGAAPL | 7 | 10 | | 1927 |
| PSA | SVTWIGAAPLI | 7 | 11 | | 1928 |
| PSM | SVYETYEL | 554 | 8 | | 1929 |
| PAP | SWATEDTM | 225 | 8 | | 1930 |
| PAP | SWATEDTMTKL | 225 | 11 | | 1931 |
| PSM | SWDAEEFGL | 420 | 9 | | 1932 |
| PSM | SWDAEEFGLL | 420 | 10 | | 1933 |
| Kallikrein | SWGPEPCAL | 228 | 9 | | 1934 |
| PSA | SWGSEPCAL | 224 | 9 | 0.0001 | 1935 |
| PAP | SWPQGFGQL | 62 | 9 | 0.0013 | 1936 |
| PSM | SWRGSLKVPY | 318 | 10 | | 1937 |
| PSM | SWTKKSPSPEF | 496 | 11 | | 1938 |
| PAP | SYKHEQVY | 96 | 8 | | 1939 |
| PAP | SYKHEQVYI | 96 | 9 | 0.2600 | 1940 |
| PAP | SYKKLIMY | 279 | 8 | | 1941 |
| PSM | SYPDGWNL | 241 | 8 | | 1942 |
| PSM | SYPNKTHPNY | 118 | 10 | | 1943 |
| PSM | SYPNKTHPNYI | 118 | 11 | | 1944 |
| PAP | TLGKLSGL | 190 | 8 | | 1945 |
| PAP | TLKSEEFQKRL | 171 | 11 | | 1946 |
| PAP | TLMSAMTNL | 112 | 9 | | 1947 |
| PAP | TLPSWATEDTM | 222 | 11 | | 1948 |
| PSM | TLRGAVEPDRY | 361 | 11 | | 1949 |
| PSM | TLRVDCTPL | 461 | 9 | | 1950 |
| PSM | TLRVDCTPLM | 461 | 10 | | 1951 |
| PSM | TLRVDCTPLMY | 461 | 11 | | 1952 |
| PAP | TMTKLREL | 231 | 8 | | 1953 |
| PAP | TMTKLRELSEL | 231 | 11 | | 1954 |
| Kallikrein | TTCYASGW | 150 | 8 | | 1955 |
| PSA | TTCYASGW | 146 | 8 | | 1956 |
| Kallikrein | TTCYASGWGSI | 150 | 11 | | 1957 |
| PSA | TTCYASGWGSI | 146 | 11 | | 1958 |
| PAP | TTVSGLQM | 291 | 8 | | 1959 |
| PAP | TTVSGLQMAL | 291 | 10 | | 1960 |
| PSM | TVAQVRGGM | 575 | 9 | | 1961 |
| PSM | TVAQVRGGMVF | 575 | 11 | | 1962 |
| PAP | TVPLSEDQL | 145 | 9 | | 1963 |
| PAP | TVPLSEDQLL | 145 | 10 | | 1964 |
| PAP | TVPLSEDQLLY | 145 | 11 | | 1965 |
| PSM | TVQAAAETL | 738 | 9 | | 1966 |
| PAP | TVSGLQMAL | 292 | 9 | | 1967 |
| PSA | TWIGAAPL | 9 | 8 | | 1968 |
| PSA | TWIGAAPLI | 9 | 9 | 0.1100 | 1969 |
| PSA | TWIGAAPLIL | 9 | 10 | 0.3600 | 1970 |
| PSM | TYELVEKF | 558 | 8 | | 1971 |
| PSM | TYELVEKFY | 558 | 9 | | 1972 |
| PSM | TYSVSFDSL | 624 | 9 | | 1973 |
| PSM | TYSVSFDSLF | 624 | 10 | 3.2000 | 1974 |
| PSM | VFELANSI | 584 | 8 | | 1975 |
| PSM | VFELANSIVL | 584 | 10 | | 1976 |
| PSM | VFFQRLGI | 523 | 8 | | 1977 |
| PSA | VFLTLSVTW | 2 | 9 | 2.1000 | 1978 |
| PSA | VFLTLSVTWI | 2 | 10 | 0.0062 | 1979 |
| PSA | VFQVSHSF | 85 | 8 | | 1980 |
| PAP | VFRHGDRSPI | 41 | 10 | 0.0005 | 1981 |
| PSM | VIARYGKVF | 201 | 9 | | 1982 |
| PSM | VILGGHRDSW | 372 | 10 | | 1983 |
| PSA | VILLGRHSL | 68 | 9 | | 1984 |
| PSA | VILLGRHSLF | 68 | 10 | | 1985 |
| PSM | VILYSDPADY | 225 | 10 | | 1986 |
| PSM | VILYSDPADYF | 225 | 11 | | 1987 |
| PAP | VIPQDWSTECM | 363 | 11 | | 1988 |
| PSM | VIYAPSSHNKY | 690 | 11 | | 1989 |
| PSM | VLAGGFFL | 27 | 8 | | 1990 |
| PSM | VLAGGFFLL | 27 | 9 | | 1991 |
| PSM | VLAGGFFLLGF | 27 | 11 | | 1992 |
| PAP | VLAKELKF | 30 | 8 | | 1993 |
| PAP | VLAKELKFVTL | 30 | 11 | | 1994 |
| Kallikrein | VLGLPTQEPAL | 138 | 11 | | 1995 |
| PSM | VLPFDCRDY | 592 | 9 | | 1996 |
| Kallikrein | VLQGITSW | 222 | 8 | | 1997 |
| PSA | VLQGITSW | 218 | 8 | | 1998 |
| PSM | VLRKYADKI | 603 | 9 | | 1999 |
| PSM | VLRKYADKIY | 603 | 10 | | 2000 |
| PSM | VLRMMNDQL | 660 | 9 | | 2001 |
| PSM | VLRMMNDQLM | 660 | 10 | | 2002 |
| PSM | VLRMMNDQLMF | 660 | 11 | | 2003 |
| PSA | VLTAAHCI | 56 | 8 | | 2004 |
| Kallikrein | VLTAAHCL | 60 | 8 | | 2005 |
| Kallikrein | VLVHPQWVL | 53 | 9 | | 2006 |
| PSA | VLVHPQWVL | 49 | 9 | | 2007 |
| PAP | VLVNEILNHM | 262 | 10 | | 2008 |
| PSA | VMDLPTQEPAL | 134 | 11 | | 2009 |
| Kallikrein | VTEFMLCAGL | 192 | 10 | | 2010 |
| Kallikrein | VTEFMLCAGLW | 192 | 11 | | 2011 |
| PSA | VTKFMLCAGRW | 188 | 11 | | 2012 |
| PSM | VTRIYNVI | 352 | 8 | | 2013 |
| PSM | VTRIYNVIGTL | 352 | 11 | | 2014 |
| PSA | VTWIGAAPL | 8 | 9 | | 2015 |
| PSA | VTWIGAAPLI | 8 | 10 | | 2016 |
| PSA | VTWIGAAPLIL | 8 | 11 | | 2017 |
| PSA | VVFLTLSVTW | 1 | 10 | | 2018 |
| PSA | VVFLTLSVTWI | 1 | 11 | | 2019 |
| PSM | VVHEIVRSF | 394 | 9 | | 2020 |
| Kallikrein | VVHYRKWI | 246 | 8 | | 2021 |
| PSA | VVHYRKWI | 242 | 8 | | 2022 |
| PSM | VVLRKYADKI | 602 | 10 | | 2023 |
| PSM | VVLRKYADKIY | 602 | 11 | | 2024 |
| Kallikrein | VWLGRHNL | 73 | 8 | | 2025 |
| Kallikrein | VWLGRHNLF | 73 | 9 | | 2026 |
| PSM | VYETYELVEKF | 555 | 11 | | 2027 |
| PAP | VYNGLLPPY | 302 | 9 | 0.0320 | 2028 |
| Kallikrein | VYTKVVHY | 242 | 8 | | 2029 |
| Kallikrein | VYTKVVHYRKW | 242 | 11 | | 2030 |
| PSM | VYVNYARTEDF | 175 | 11 | | 2031 |
| PSA | WIGAAPLI | 10 | 8 | | 2032 |
| PSA | WIGAAPLIL | 10 | 9 | | 2033 |
| PSM | WLCAGALVL | 20 | 9 | | 2034 |
| PAP | WLDRSVLAKEL | 25 | 11 | | 2035 |
| Kallikrein | WLGRHNLF | 74 | 8 | | 2036 |
| PSM | WTKKSPSPEF | 497 | 10 | | 2037 |
| PSA | WVLTAAHCI | 55 | 9 | | 2038 |
| Kallikrein | WVLTAAHCL | 59 | 9 | | 2039 |
| PSM | YFAPGVKSY | 234 | 9 | | 2040 |
| PAP | YFEKGEYF | 319 | 8 | | 2041 |
| PAP | YFEKGEYFVEM | 319 | 11 | | 2042 |
| PSM | YINADSSI | 449 | 8 | | 2043 |
| PAP | YIRKRYRKF | 84 | 9 | | 2044 |
| PAP | YIRKRYRKFL | 84 | 10 | | 2045 |
| PAP | YIRSTDVDRTL | 103 | 11 | | 2046 |
| PAP | YLPPRNCPRF | 155 | 10 | | 2047 |
| PSM | YTKNWETNKF | 537 | 10 | | 2048 |
| Kallikrein | YTKVVHYRKW | 243 | 10 | | 2049 |
| PSA | YTKVVHYRKW | 239 | 10 | | 2050 |
| Kallikrein | YTKVVHYRKWI | 243 | 11 | | 2051 |
| PSA | YTKVVHYRKWI | 239 | 11 | | 2052 |
| PSM | YTLRVDCTPL | 460 | 10 | | 2053 |
| PSM | YTLRVDCTPLM | 460 | 11 | | 2054 |
| PSM | YVILGGHRDSW | 371 | 11 | | 2055 |
| PSM | YVNYARTEDF | 176 | 10 | | 2056 |
| PSM | YVNYARTEDFF | 176 | 11 | | 2057 |
| PSM | YYDAQKLL | 299 | 8 | | 2058 |
| PSM | YYDAQKLLEKM | 299 | 11 | | 2059 |
| PAP | YYRNETQHEPY | 330 | 11 | | 2060 |

[0444] TABLE X1

Prostate B07 Supermotif Peptides
with Binding Data

| | | | | | |
|---|---|---|---|---|---|
| | | | | | Seq. |
| | | | Amino | | Id. |
| Protein | Sequence | Position | Acids | B*0702 | No. |

| | | | | | |
|---|---|---|---|---|---|
| PSM | APGVKSYPDGW | 236 | 11 | | 2061 |
| PSA | APLILSRI | 14 | 8 | | 2062 |
| PSA | APLILSRIV | 14 | 9 | 0.0007 | 2063 |
| PAP | APLLLARA | 4 | 8 | | 2064 |
| PAP | APLLLARAA | 4 | 9 | 0.0210 | 2065 |
| PAP | APLLLARAASL | 4 | 11 | | 2066 |
| PSM | APPDSSWRGSL | 313 | 11 | | 2067 |
| PSM | APSSHNKY | 693 | 8 | | 2068 |
| PSM | APSSHNKYA | 693 | 9 | 0.0003 | 2069 |
| PAP | CPLERFAEL | 351 | 9 | 0.0810 | 2070 |
| PAP | CPLERFAELV | 351 | 10 | 0.0054 | 2071 |
| PSM | DPADYFAPGV | 230 | 10 | 0.0002 | 2072 |
| PAP | DPIKESSW | 56 | 8 | | 2073 |
| PSM | DPLGLPDRPF | 677 | 10 | 0.0001 | 2074 |
| PSM | DPLGLPDRPFY | 677 | 11 | | 2075 |
| PSM | DPLTPGYPA | 266 | 9 | 0.0001 | 2076 |
| PAP | DPLYCESV | 211 | 8 | | 2077 |
| PAP | DPLYCESVHNF | 211 | 11 | | 2078 |
| PSM | DPMFKYHL | 567 | 8 | | 2079 |
| PSM | DPMFKYHLTV | 567 | 10 | 0.0001 | 2080 |
| PSM | DPMFKYHLTVA | 567 | 11 | | 2081 |
| PSM | DPQSGAAV | 387 | 8 | | 2082 |
| PSM | DPQSGAAVV | 387 | 9 | 0.0011 | 2083 |
| PSM | DPSKAWGEV | 720 | 9 | 0.0002 | 2084 |
| PSA | EPAELTDA | 124 | 8 | | 2085 |
| PSA | EPAELTDAV | 124 | 9 | 0.0001 | 2086 |
| PSA | EPAELTDAVKV | 124 | 11 | | 2087 |
| Kallikrein | EPAKITDV | 128 | 8 | | 2088 |
| Kallikrein | EPAKITDVV | 128 | 9 | | 2089 |
| Kallikrein | EPAKITDVVKV | 128 | 11 | | 2090 |
| Kallikrein | EPALGTTCY | 145 | 9 | | 2091 |
| PSA | EPALGTTCY | 141 | 9 | | 2092 |
| Kallikrein | EPALGTTCYA | 145 | 10 | 0.0002 | 2093 |
| PSA | EPALGTTCYA | 141 | 10 | 0.0002 | 2094 |
| Kallikrein | EPCALPEKPA | 232 | 10 | | 2095 |
| Kallikrein | EPCALPEKPAV | 232 | 11 | | 2096 |
| PSA | EPCALPERPSL | 228 | 11 | | 2097 |
| PSM | EPDRYVIL | 367 | 8 | | 2098 |
| Kallikrein | EPEDTGQRV | 82 | 9 | | 2099 |
| Kallikrein | EPEDTGQRVPV | 82 | 11 | | 2100 |
| Kallikrein | EPEEFLRPRSL | 161 | 11 | | 2101 |
| PSA | EPEEFLTPKKL | 157 | 11 | | 2102 |
| PSM | EPPPPGYENV | 145 | 10 | 0.0001 | 2103 |
| PSM | FPGIYDAL | 705 | 8 | | 2104 |
| PSM | FPGIYDALF | 705 | 9 | 0.0013 | 2105 |
| PSM | FPGIYDALFDI | 705 | 11 | | 2106 |
| PSA | FPHPLYDM | 92 | 8 | | 2107 |
| PSA | FPHPLYDMSL | 92 | 10 | 1.1000 | 2108 |
| PSA | FPHPLYDMSLL | 92 | 11 | | 2109 |
| Kallikrein | FPHPLYNM | 96 | 8 | | 2110 |
| Kallikrein | FPHPLYNMSL | 96 | 10 | | 2111 |
| Kallikrein | FPHPLYNMSLL | 96 | 11 | | 2112 |
| PAP | FPPEGVSI | 124 | 8 | | 2113 |
| PAP | FPPEGVSIW | 124 | 9 | 0.0001 | 2114 |
| PAP | FPTDPIKESSW | 53 | 11 | | 2115 |
| PSM | GPGFTGNF | 330 | 8 | | 2116 |
| Kallikrein | GPLVCNGV | 215 | 8 | | 2117 |
| PSA | GPLVCNGV | 211 | 8 | | 2118 |
| Kallikrein | GPLVCNGVL | 215 | 9 | 0.0280 | 2119 |
| PSA | GPLVCNGVL | 211 | 9 | 0.0280 | 2120 |
| PAP | GPVIPQDW | 361 | 8 | | 2121 |
| PSA | HPEDTGQV | 78 | 8 | | 2122 |
| PSA | HPEDTGQVF | 78 | 9 | 0.0006 | 2123 |
| PSA | HPEDTGQVFQV | 78 | 11 | | 2124 |
| PSM | HPIGYYDA | 295 | 8 | | 2125 |
| PSM | HPIGYYDAQKL | 295 | 11 | | 2126 |
| PSA | HPLYDMSL | 94 | 8 | | 2127 |
| PSA | HPLYDMSLL | 94 | 9 | 0.0018 | 2128 |
| Kallikrein | HPLYNMSL | 98 | 8 | | 2129 |
| Kallikrein | HPLYNMSLL | 98 | 9 | | 2130 |
| PSM | HPNYISII | 124 | 8 | | 2131 |
| PSM | HPQEMKTY | 618 | 8 | | 2132 |
| PSM | HPQEMKTYSV | 618 | 10 | 0.0003 | 2133 |
| PSA | HPQKVTKF | 184 | 8 | | 2134 |
| PSA | HPQKVTKYM | 184 | 9 | 0.1700 | 2135 |
| PSA | HPQKVTKFML | 184 | 10 | 0.0230 | 2136 |
| Kallikrein | HPQWVLTA | 56 | 8 | | 2137 |
| PSA | HPQWVLTA | 52 | 8 | | 2138 |
| Kallikrein | HPQWVLTAA | 56 | 9 | 0.0240 | 2139 |
| PSA | HPQWVLTAA | 52 | 9 | 0.0240 | 2140 |
| PAP | HPYKDFIA | 182 | 8 | | 2141 |
| PAP | HPYKDFIATL | 182 | 10 | 0.0150 | 2142 |
| PSM | IPHLAGTEQNF | 80 | 11 | | 2143 |
| PAP | IPQDWSTECM | 364 | 10 | 0.0019 | 2144 |
| PAP | IPSYKKLI | 277 | 8 | | 2145 |
| PAP | IPSYKKLIM | 277 | 9 | 5.8000 | 2146 |
| PAP | IPSYKKLIMY | 277 | 10 | | 2147 |
| PSM | IPVHPIGY | 292 | 8 | | 2148 |
| PSM | IPVHPIGYY | 292 | 9 | 0.0007 | 2149 |
| PSM | IPVHPIGYYDA | 292 | 11 | | 2150 |
| PAP | IPVHTVPL | 141 | 8 | | 2151 |
| Kallikrein | KPAVYTKV | 239 | 8 | | 2152 |
| Kallikrein | KPAVYTKVV | 239 | 9 | | 2153 |
| Kallikrein | KPAVYTKVVHY | 239 | 11 | | 2154 |
| PSM | LPDRPFYRHV | 681 | 10 | 0.0007 | 2155 |
| PSM | LPDRPFYRHVI | 681 | 11 | | 2156 |
| Kallikrein | LPEKPAVY | 236 | 8 | | 2157 |
| Kallikrein | LPEKPAVYTKV | 236 | 11 | | 2158 |
| PSA | LPERPSLY | 232 | 8 | | 2159 |
| PSA | LPERPSLYTKV | 232 | 11 | | 2160 |
| PSM | LPFDCRDY | 593 | 8 | | 2161 |
| PSM | LPFDCRDYA | 593 | 9 | 0.0011 | 2162 |
| PSM | LPFDCRDYAV | 593 | 10 | 0.0150 | 2163 |
| PSM | LPFDCRDYAVV | 593 | 11 | | 2164 |
| PAP | LPFRNCPRF | 156 | 9 | 0.0049 | 2165 |
| PAP | LPGCSPSCPL | 344 | 10 | 0.0360 | 2166 |
| PSM | LPGGGVQRGNI | 248 | 11 | | 2167 |
| PAP | LPPYASCHL | 307 | 9 | 0.0029 | 2168 |
| PSM | LPSIPVHPI | 289 | 9 | 0.0790 | 2169 |
| PSM | LPSIPVHPIGY | 289 | 11 | | 2170 |
| PAP | LPSWATEDTM | 223 | 10 | 0.0032 | 2171 |
| Kallikrein | LPTQEPAL | 141 | 8 | | 2172 |
| PSA | LPTQEPAL | 137 | 8 | | 2173 |
| PSM | MPEGDLVY | 169 | 8 | | 2174 |
| PSM | MPEGDLVYV | 169 | 9 | 0.0001 | 2175 |
| PSM | MPEGDLVYVNY | 169 | 11 | | 2176 |
| PAP | NPILLWQPI | 133 | 9 | 0.0026 | 2177 |
| PAP | NPILLWQPIPV | 133 | 11 | | 2178 |
| PSM | NPIVLRMM | 657 | 8 | | 2179 |
| PSM | PPDSSWRGSL | 314 | 10 | 0.0012 | 2180 |
| PAP | PPEGVSIW | 125 | 8 | | 2181 |
| PAP | PPEGVSIWNPI | 125 | 11 | | 2182 |
| PSM | PPFSAFSPQGM | 159 | 11 | | 2183 |
| PSM | PPGYENVSDI | 148 | 10 | 0.0001 | 2184 |
| PSM | PPGYENVSDIV | 148 | 11 | | 2185 |
| PSM | PPPGYENV | 147 | 8 | | 2186 |
| PSM | PPPGYENVSDI | 147 | 11 | | 2187 |
| PSM | PPPPGYENV | 146 | 9 | 0.0001 | 2188 |
| PAP | PPYASCHL | 308 | 8 | | 2189 |
| PAP | PPYASCHLTEL | 308 | 11 | | 2190 |
| PAP | QPIPVHTV | 139 | 8 | | 2191 |
| PAP | QPIPVHTVPL | 139 | 10 | 0.2400 | 2192 |
| Kallikrein | QPWQVAVY | 36 | 8 | | 2193 |
| PSA | QPWQVLVA | 32 | 8 | | 2194 |
| Kallikrein | RPDEDSSHDL | 112 | 10 | | 2195 |
| Kallikrein | RPDEDSSHDLM | 112 | 11 | | 2196 |
| PSM | RPFYRHVI | 684 | 8 | | 2197 |
| PSM | RPFYRHVIY | 684 | 9 | 0.4700 | 2198 |
| PSM | RPFYRHVIYA | 684 | 10 | 0.7200 | 2199 |
| PSA | RPGDDSSHDL | 108 | 10 | 0.0117 | 2200 |
| PSA | RPGDDSSHDLM | 108 | 11 | | 2201 |
| PSM | RPRRTILF | 411 | 8 | | 2202 |
| PSM | RPRRTILFA | 411 | 9 | 0.7800 | 2203 |
| PSM | RPRRTILFASW | 411 | 11 | | 2204 |
| Kallikrein | RPRSLQCV | 167 | 8 | | 2205 |
| Kallikrein | RPRSLQCVSL | 167 | 10 | | 2206 |
| PSM | RPRWLCAGA | 17 | 9 | 0.3200 | 2207 |
| PSM | RPRWLCAGAL | 17 | 10 | 5.2000 | 2208 |
| PSM | RPRWLCAGALV | 17 | 11 | | 2209 |
| PSA | RPSLYTKV | 235 | 8 | | 2210 |
| PSA | RPSLYTKVV | 235 | 9 | | 2211 |
| PSA | RPSLYTKVVHY | 235 | 11 | | 2212 |
| PSM | SPDEGFEGKSL | 483 | 11 | | 2213 |
| PSM | SPEFSGMPRI | 503 | 10 | 0.0020 | 2214 |
| PSA | SPIDTFPTDPI | 48 | 11 | | 2215 |
| PSM | SPQGMPEGDL | 165 | 10 | 0.0002 | 2216 |
| PSM | SPQGMPEGDLV | 165 | 11 | | 2217 |
| PSA | SPSGPLERF | 348 | 9 | 0.0066 | 2218 |
| PSA | SPSCPLERFA | 348 | 10 | 0.0002 | 2219 |
| PSM | SPSPEFSGM | 501 | 9 | 0.0025 | 2220 |
| PSM | TPGYPANEY | 269 | 9 | 0.0012 | 2221 |
| PSM | TPGYPANEYA | 269 | 10 | 0.0001 | 2222 |
| PSM | TPGYPANEYAY | 269 | 11 | | 2223 |
| PSM | TPKHNMKA | 53 | 8 | | 2224 |
| PSM | TPKHNMKAF | 53 | 9 | 0.0990 | 2225 |
| PSM | TPKHNMKAFL | 53 | 10 | 0.0200 | 2226 |
| PSA | TPKKLQCV | 163 | 8 | | 2227 |
| PSA | TPKKLQCVDL | 163 | 10 | 0.0006 | 2228 |
| PSM | TPLMYSLV | 467 | 8 | | 2229 |
| PSM | TPLMYSLVHNL | 467 | 11 | | 2230 |
| Kallikrein | VPLIQSRI | 18 | 8 | | 2231 |
| Kallikrein | VPLIQSRIV | 18 | 9 | | 2232 |
| PSA | VPLSEDQL | 146 | 8 | | 2233 |
| PSA | VPLSEDQLL | 146 | 9 | 0.0002 | 2234 |
| PSA | VPLSEDQLLY | 146 | 10 | 0.0011 | 2235 |
| PSA | VPLSEDQLLYL | 146 | 11 | | 2236 |
| Kallikrein | VPVSHSFPHPL | 90 | 11 | | 2237 |
| PSM | VPYNVGPGF | 325 | 9 | 0.0039 | 2238 |
| PSA | WPQGFGQL | 63 | 8 | | 2239 |
| PSA | WPQGFGQLTQL | 63 | 11 | | 2240 |
| PSM | YPANEYAY | 272 | 8 | | 2241 |
| PSM | YPLYHSVY | 549 | 8 | | 2242 |
| PSM | YPLYHSVYETY | 549 | 11 | | 2243 |
| PSM | YPNKTHPNY | 119 | 9 | 0.0001 | 2244 |
| PSM | YPNKTHPNYI | 119 | 10 | 0.0035 | 2245 |

[0445] TABLE XII
Prostate B27 Supermotif with Binding Data

| | | | | |
|---|---|---|---|---|
| | | | No. of | Seq. |
| | | | Amino | Id. |
| Protein | Sequence | Position | Acids | No. |

| | | | | |
|---|---|---|---|---|
| Kallikrein | AHCGGVLV | 48 | 8 | 2246 |
| PSA | AHCIRNKSV | 60 | 9 | 2247 |
| PSA | AHCIRNKSVI | 60 | 10 | 2248 |
| PSA | AHCIRNKSVIL | 60 | 11 | 2249 |
| Kallikrein | AHCLKKNSQV | 64 | 10 | 2250 |
| Kallikrein | AHCLKKNSQVW | 64 | 11 | 2251 |
| PAP | AHDITVSGL | 288 | 9 | 2252 |
| PAP | AHDTTVSGLQM | 288 | 11 | 2253 |
| PSM | AHYDVLLSY | 111 | 9 | 2254 |
| PAP | AKELKFVTL | 32 | 9 | 2255 |
| PAP | AKELKFVTLV | 32 | 10 | 2256 |
| PAP | AKELKFVTLVF | 32 | 11 | 2257 |
| PSM | AKGVILYSDPA | 222 | 11 | 2258 |
| Kallikrein | AKTTDVVKV | 130 | 9 | 2259 |
| Kallikrein | AKITDVVKVL | 130 | 10 | 2260 |
| PSM | AKQIQSQW | 93 | 8 | 2261 |
| PSM | AKQIQSQWKEF | 93 | 11 | 2262 |
| PAP | ARAASLSL | 9 | 8 | 2263 |
| PAP | ARAASLSLGF | 9 | 10 | 2264 |
| PAP | ARAASLSLGFL | 9 | 11 | 2265 |
| Kallikrein | ARAYSEKV | 185 | 8 | 2266 |
| Kallikrein | ARAYSEKVTEF | 185 | 11 | 2267 |
| PSM | ARRPRWLCA | 15 | 9 | 2268 |
| PSM | ARRPRWLCAGA | 15 | 11 | 2269 |
| PSM | ARTEDFFKL | 180 | 9 | 2270 |
| PAP | CHLTELYF | 313 | 8 | 2271 |
| PSM | CRDYAVVL | 597 | 8 | 2272 |
| PSM | CRDYAVVLRKY | 597 | 11 | 2273 |
| PSM | DKIYSISM | 609 | 8 | 2274 |
| PSM | DKSNPIVL | 654 | 8 | 2275 |
| PSM | DKSNPIVLRM | 654 | 10 | 2276 |
| PSM | DKSNPIVLRMM | 654 | 11 | 2277 |
| PSM | DRPFYRHV | 683 | 8 | 2278 |
| PSM | DRPFYRHVI | 683 | 9 | 2279 |
| PSM | DRPFYRHVIY | 683 | 10 | 2280 |
| PSM | DRPFYRHVIYA | 683 | 11 | 2281 |
| PAP | DRSPIDTF | 46 | 8 | 2282 |
| PAP | DRSVLAKEL | 27 | 9 | 2283 |
| PAP | DRSVLAKELKF | 27 | 11 | 2284 |
| PAP | DRTLMSAM | 110 | 8 | 2285 |
| PAP | DRTLMSAMTNL | 110 | 11 | 2286 |
| PSM | EKFYDPMF | 563 | 8 | 2287 |
| PSM | EKFYDPMFKY | 563 | 10 | 2288 |
| PAP | EKGEYFVEM | 321 | 9 | 2289 |
| PAP | EKGEYFVEMY | 321 | 10 | 2290 |
| PAP | EKGEYFVEMYY | 321 | 11 | 2291 |
| Kallikrein | EKHSQPWQV | 32 | 9 | 2292 |
| PSA | EKHSQPWQV | 28 | 9 | 2293 |
| Kallikrein | EKHSQPWQVA | 32 | 10 | 2294 |
| Kallikrein | EKHSQPWQVAV | 32 | 11 | 2295 |
| PSA | EKHSQPWQVL | 28 | 10 | 2296 |
| PSA | EKHSQPWQVLV | 28 | 11 | 2297 |
| Kallikrein | EKPAVYTKV | 238 | 9 | 2298 |
| Kallikrein | EKPAVYTKVV | 238 | 10 | 2299 |
| PAP | EKSRLQGGV | 254 | 9 | 2300 |
| PAP | EKSRLQGGVL | 254 | 10 | 2301 |
| PAP | EKSRLQGGVLV | 254 | 11 | 2302 |
| Kallikrein | EKVTEFML | 190 | 8 | 2303 |
| Kallikrein | EKVTEFMLCA | 190 | 10 | 2304 |
| PSM | ERAFIDPL | 672 | 8 | 2305 |
| PSM | ERAFIDPLGL | 672 | 10 | 2306 |
| PAP | ERFAELVGPV | 354 | 10 | 2307 |
| PAP | ERFAELVGPVI | 354 | 11 | 2308 |
| PSM | ERGVAYINA | 444 | 9 | 2309 |
| PSA | ERPSLYTKV | 234 | 9 | 2310 |
| PSA | ERPSLYTKVV | 234 | 10 | 2311 |
| PSA | FHPEDTGQV | 77 | 9 | 2312 |
| PSA | FHPEDTGQVF | 77 | 10 | 2313 |
| PSM | FKLERDMKI | 186 | 9 | 2314 |
| PSM | FKYHLTVA | 570 | 8 | 2315 |
| PSM | FKYIALTVAQV | 570 | 10 | 2316 |
| PSM | FRGNKVKNA | 209 | 9 | 2317 |
| PSM | FRGNKVKNAQL | 209 | 11 | 2318 |
| PAP | FRHGDRSPI | 42 | 9 | 2319 |
| PAP | FRNCPRFQEL | 158 | 10 | 2320 |
| PSM | GHRDSWVF | 376 | 8 | 2321 |
| PSM | GHRDSWVFGGI | 376 | 11 | 2322 |
| PSM | GKIVIARY | 198 | 8 | 2323 |
| PSM | GKIVIARYGKV | 198 | 11 | 2324 |
| PAP | GKLSGLHGQDL | 192 | 11 | 2325 |
| PSM | GKSLYESW | 490 | 8 | 2326 |
| PSM | GKVFRGNKV | 206 | 9 | 2327 |
| PSM | GRARYTKNW | 533 | 9 | 2328 |
| PSA | GRAVCGGV | 42 | 8 | 2329 |
| PSA | GRAVCGGVL | 42 | 9 | 2330 |
| PSA | GRAVGGGVLV | 42 | 10 | 2331 |
| PAP | HKQKEKSRL | 250 | 9 | 2332 |
| PSM | HRDSWVFGGI | 377 | 10 | 2333 |
| PAP | IHKQKEKSRL | 249 | 10 | 2334 |
| PSM | IHSTNEVTRI | 346 | 10 | 2335 |
| PSM | IHSTNEVTRIY | 346 | 11 | 2336 |
| PAP | IKESSWPQGF | 58 | 10 | 2337 |
| PSM | IKKFLYNF | 70 | 8 | 2338 |
| PSM | IKKFLYNFTQI | 70 | 11 | 2339 |
| PSM | IKSSNEATNI | 43 | 10 | 2340 |
| PAP | IRKRYRKF | 85 | 8 | 2341 |
| PAP | IRKRYRKFL | 85 | 9 | 2342 |
| PSA | IRNKSVIL | 63 | 8 | 2343 |
| PSA | IRNKSVILL | 63 | 9 | 2344 |
| PAP | IRSTDVDRTL | 104 | 10 | 2345 |
| PAP | IRSTDVDRTLM | 104 | 11 | 2346 |
| PSM | KHNMKAFL | 55 | 8 | 2347 |
| PSM | KHNMKAFLDEL | 55 | 11 | 2348 |
| PSM | KHPQEMKTY | 617 | 9 | 2349 |
| PSM | KHPQEMKTYSV | 617 | 11 | 2350 |
| Kallikrein | KHSQPWQV | 33 | 8 | 2351 |
| PSA | KHSQPWQV | 29 | 8 | 2352 |
| Kallikrein | KHSQPWQVA | 33 | 9 | 2353 |
| Kallikrein | KHSQPWQVAV | 33 | 10 | 2354 |
| Kallikrein | KHSQPWQVAVY | 33 | 11 | 2355 |
| PSA | KHSQPWQVL | 29 | 9 | 2356 |
| PSA | KHSQPWQVLV | 29 | 10 | 2357 |
| PSA | KHSQPWQVLVA | 29 | 11 | 2358 |
| PSM | KKEGWRPRRTI | 406 | 11 | 2359 |
| PSM | KKFLYNFTQI | 71 | 10 | 2360 |
| PAP | KKLIMYSA | 281 | 8 | 2361 |
| PSA | KKLQCVDL | 165 | 8 | 2362 |
| PSA | KKLQCVDLHV | 165 | 10 | 2363 |
| PSA | KKLQCVDLHVI | 165 | 11 | 2364 |
| Kallikrein | KKNSQVWL | 68 | 8 | 2365 |
| PSM | KKSPSPEF | 499 | 8 | 2366 |
| PSM | KKSPSPEFSGM | 499 | 11 | 2367 |
| PAP | KRATQIPSY | 272 | 9 | 2368 |
| PAP | KRLHPYKDF | 179 | 9 | 2369 |
| PAP | KRLHPYKDFI | 179 | 10 | 2370 |
| PAP | KRLHPYKDFIA | 179 | 11 | 2371 |
| PSM | KRQIYVAA | 729 | 8 | 2372 |
| PSM | KRQIYVAAF | 729 | 9 | 2373 |
| PSM | KRQIYVAAFTV | 729 | 11 | 2374 |
| PAP | KRYRKFLNESY | 87 | 11 | 2375 |
| PSM | LHETDSAV | 5 | 8 | 2376 |
| PSM | LHETDSAVA | 5 | 9 | 2377 |
| PSM | LHETDSAVATA | 5 | 11 | 2378 |
| PAP | LHGQDLFGI | 197 | 9 | 2379 |
| PAP | LHGQDLFGIW | 197 | 10 | 2380 |
| Kallikrein | LHLLSNDM | 176 | 8 | 2381 |
| Kallikrein | LHLLSNDMCA | 176 | 10 | 2382 |
| PAP | LHPYKDFI | 181 | 8 | 2383 |
| PAP | LHPYKDFIA | 181 | 9 | 2384 |
| PAP | LHPYKDFIATL | 181 | 11 | 2385 |
| PSA | LHVISNDV | 172 | 8 | 2386 |
| PSA | LHVISNDVCA | 172 | 10 | 2387 |
| PSM | LKAENIKKF | 65 | 9 | 2388 |
| PSM | LKAENIKKFL | 65 | 10 | 2389 |
| PSM | LKAENIKKFLY | 65 | 11 | 2390 |
| PAP | LKFVTLVF | 35 | 8 | 2391 |
| Kallikrein | LKKNSQVW | 67 | 8 | 2392 |
| Kallikrein | LKKNSQVWL | 67 | 9 | 2393 |
| PAP | LKSEEFQKRL | 172 | 10 | 2394 |
| PSM | LKSPDEGF | 481 | 8 | 2395 |
| PSM | LKVPYNVGPGF | 323 | 11 | 2396 |
| PAP | LRELSELSL | 235 | 9 | 2397 |
| PAP | LRELSELSLL | 235 | 10 | 2398 |
| PSM | LRGAVEPDRY | 362 | 10 | 2399 |
| PSM | LRGAVEPDRYV | 362 | 11 | 2400 |
| PSM | LRKYADKI | 604 | 8 | 2401 |
| PSM | LRKYADKIY | 604 | 9 | 2402 |
| PSM | LRKYADKIYSI | 604 | 11 | 2403 |
| PSA | LRLSEPAEL | 120 | 9 | 2404 |
| Kallikrein | LRLSEPAKI | 124 | 9 | 2405 |
| PSM | LRMMNDQL | 661 | 8 | 2406 |
| PSM | LRMMNDQLM | 661 | 9 | 2407 |
| PSM | LRMMNDQLMF | 661 | 10 | 2408 |
| PSM | LRMMNDQLMFL | 661 | 11 | 2409 |
| Kallikrein | LRPDEDSSHDL | 111 | 11 | 2410 |
| PSA | LRPGDDSSHDL | 107 | 11 | 2411 |
| Kallikrein | LRPRSLQCV | 166 | 9 | 2412 |
| Kallikrein | LRPRSLQCVSL | 166 | 11 | 2413 |
| PSM | LRVDCTPL | 462 | 8 | 2414 |
| PSM | LRVDCTPLM | 462 | 9 | 2415 |
| PSM | LRVDCTPLMY | 462 | 10 | 2416 |
| PSM | MHIHSTNEV | 344 | 9 | 2417 |
| PSM | MKAFLDEL | 58 | 8 | 2418 |
| PSM | MKAFLDELKA | 58 | 10 | 2419 |
| PSM | MKHPQEMKTY | 616 | 10 | 2420 |
| PSM | MKINCSGKI | 192 | 9 | 2421 |
| PSM | MKINCSGKIV | 192 | 10 | 2422 |
| PSM | MKINCSGKIVI | 192 | 11 | 2423 |
| PAP | MKRATQIPSY | 271 | 10 | 2424 |
| PSM | MKTYSVSF | 622 | 8 | 2425 |
| PSM | MKTYSVSFDSL | 622 | 11 | 2426 |
| PAP | MRAAPLLL | 1 | 8 | 2427 |
| PAP | MRAAPLLLA | 1 | 9 | 2428 |
| PAP | MRAAPLLLARA | 1 | 11 | 2429 |
| PAP | NHMKRATQI | 269 | 9 | 2430 |
| PSM | NKFSGYPL | 544 | 8 | 2431 |
| PSM | NKFSGYPLY | 544 | 9 | 2432 |
| PSM | NKTHPNYI | 121 | 8 | 2433 |
| PSM | NKTHPNYISI | 121 | 10 | 2434 |
| PSM | NKTHPNYISII | 121 | 11 | 2435 |
| PSM | NKVKNAQL | 212 | 8 | 2436 |
| PSM | NKVKNAQLA | 212 | 9 | 2437 |
| PSM | NKVKNAQLAGA | 212 | 11 | 2438 |
| PSM | NKYAGESF | 698 | 8 | 2439 |
| PSM | NKYAGESFPGI | 698 | 11 | 2440 |
| PSM | PHLAGTEQNF | 81 | 10 | 2441 |
| PSA | PHPLYDMSL | 93 | 9 | 2442 |
| PSA | PHPLYDMSLL | 93 | 10 | 2443 |
| Kallikrein | PHPLYNMSL | 97 | 9 | 2444 |
| Kallikrein | PHPLYNMSLL | 97 | 10 | 2445 |
| PSM | PKHNMKAF | 54 | 8 | 2446 |
| PSM | PKHNMKAFL | 54 | 9 | 2447 |
| PSA | PKKLQCVDL | 164 | 9 | 2448 |
| PSA | PKKLQCVDLHV | 164 | 11 | 2449 |
| PAP | PRFQELESETL | 162 | 11 | 2450 |
| PSM | PRRTILFA | 412 | 8 | 2451 |
| PSM | PRRTILFASW | 412 | 10 | 2452 |
| Kallikrein | PRSLQCVSL | 168 | 9 | 2453 |
| Kallikrein | PRSLQCVSLHL | 168 | 11 | 2454 |
| PSM | PRWLCAGA | 18 | 8 | 2455 |
| PSM | PRWLCAGAL | 18 | 9 | 2456 |
| PSM | PRWLCAGALV | 18 | 10 | 2457 |
| PSM | PRWLCAGALVL | 18 | 11 | 2458 |
| PAP | QHEPYPLM | 336 | 8 | 2459 |
| PAP | QHEPYPLML | 336 | 9 | 2460 |
| PAP | QHYELGEY | 77 | 8 | 2461 |
| PAP | QHYELGEYI | 77 | 9 | 2462 |
| PAP | QKEKSRLQGGV | 252 | 11 | 2463 |
| PSM | QKLLEKMGGSA | 303 | 11 | 2464 |
| PAP | QKRLHPYKDF | 178 | 10 | 2465 |
| PAP | QKRLHPYKDFI | 178 | 11 | 2466 |
| PSA | QKVTKFML | 186 | 8 | 2467 |
| PSA | QKVTKFMLCA | 186 | 10 | 2468 |
| PSM | QRGNILNL | 254 | 8 | 2469 |
| PSM | QRGNILNLNGA | 254 | 11 | 2470 |
| PSM | QRLGIASGRA | 526 | 10 | 2471 |
| Kallikrein | QRVPVSHSF | 88 | 9 | 2472 |
| PAP | RHGDRSPI | 43 | 8 | 2473 |
| PAP | RHGDRSPIDTF | 43 | 11 | 2474 |
| PAP | RKFLNESY | 90 | 8 | 2475 |
| PAP | RKRYRKFL | 86 | 8 | 2476 |
| Kallikrein | RKWIKDTI | 250 | 8 | 2477 |
| PSA | RKWIKDTI | 246 | 8 | 2478 |
| Kallikrein | RKWIKDTIA | 250 | 9 | 2479 |
| Kallikrein | RKWIKDTIAA | 250 | 10 | 2480 |
| PSA | RKWIKDTIV | 246 | 9 | 2481 |
| PSA | RKWIKDTIVA | 246 | 10 | 2482 |
| PSM | RKYADKIY | 605 | 8 | 2483 |
| PSM | RKYADKIYSI | 605 | 10 | 2484 |
| PSM | RRGIAEAV | 280 | 8 | 2485 |
| PSM | RRGIAEAVGL | 280 | 10 | 2486 |
| PSM | RRPRWLCA | 16 | 8 | 2487 |
| PSM | RRPRWLCAGA | 16 | 10 | 2488 |
| PSM | RRPRWLCAGAL | 16 | 11 | 2489 |
| PSM | RRTILFASW | 413 | 9 | 2490 |
| PSM | RRTILFASWDA | 413 | 11 | 2491 |
| Kallikrein | SHDLMLLRL | 118 | 9 | 2492 |
| PSA | SHDLMLLRL | 114 | 9 | 2493 |
| Kallikrein | SHGWAHCGGV | 44 | 10 | 2494 |
| Kallikrein | SHGWAHCGGVL | 44 | 11 | 2495 |
| PSM | SHNKYAGESF | 696 | 10 | 2496 |
| Kallikrein | SHSFPHPL | 93 | 8 | 2497 |
| PSA | SHSFPHPL | 89 | 8 | 2498 |
| Kallikrein | SHSFPHPLY | 93 | 9 | 2499 |
| PSA | SHSFPHPLY | 89 | 9 | 2500 |
| PSA | SHSFPHPLYDM | 89 | 11 | 2501 |
| Kallikrein | SHSFPHPLYNM | 93 | 11 | 2502 |
| PSM | SKAWGEVKRQI | 722 | 11 | 2503 |
| PSM | SKFSERLQDF | 644 | 10 | 2504 |
| PSM | SKLGSGNDF | 513 | 9 | 2505 |
| PSM | SKLGSGNDFEV | 513 | 11 | 2506 |
| PSM | SKVDPSKA | 717 | 8 | 2507 |
| PSM | SKVDPSKAW | 717 | 9 | 2508 |
| PAP | SKVYDPLY | 207 | 8 | 2509 |
| PSA | SRGRAVCGGV | 40 | 10 | 2510 |
| PSA | SRGRAVCGGVL | 40 | 11 | 2511 |
| PSM | SRLLQERGV | 439 | 9 | 2512 |
| PSM | SRLLQERGVA | 439 | 10 | 2513 |
| PSM | SRLLQERGVAY | 439 | 11 | 2514 |
| PAP | SRLQGGVL | 256 | 8 | 2515 |
| PAP | SRLQGGVLV | 256 | 9 | 2516 |
| PSM | THPNYISI | 123 | 8 | 2517 |
| PSM | THPNYISII | 123 | 9 | 2518 |
| PSM | TKELKSPDEGF | 478 | 11 | 2519 |
| PSA | TKFMLCAGRW | 189 | 10 | 2520 |
| PSM | TKKSPSPEF | 498 | 9 | 2521 |
| PAP | TKLRELSEL | 233 | 9 | 2522 |
| PAP | TKLRELSELSL | 233 | 11 | 2523 |
| PSM | TKNWETNKF | 538 | 9 | 2524 |
| Kallikrein | TKVVHYRKW | 244 | 9 | 2525 |
| PSA | TKVVHYRKW | 240 | 9 | 2526 |
| Kallikrein | TKVVHYRKWI | 244 | 10 | 2527 |
| PSA | TKVVHYRKWI | 240 | 10 | 2528 |
| PSM | TRIYNVIGTL | 353 | 10 | 2529 |
| PSM | VHEIVRSF | 395 | 8 | 2530 |
| PSM | VHEIVRSFGTL | 395 | 11 | 2531 |
| PAP | VHNFTLPSW | 218 | 9 | 2532 |
| PAP | VHNFTLPSWA | 218 | 10 | 2533 |
| PSM | VHNLTKEL | 474 | 8 | 2534 |
| PSM | VHPIGYYDA | 294 | 9 | 2535 |
| PSA | VHPQKVTKF | 183 | 9 | 2536 |
| PSA | VHPQKVTKFM | 183 | 10 | 2537 |
| PSA | VHPQKVTKFML | 183 | 11 | 2538 |
| Kallikrein | VHPQWVLTA | 55 | 9 | 2539 |
| PSA | VHPQWVLTA | 51 | 9 | 2540 |
| Kallikrein | VHPQWVLTAA | 55 | 10 | 2541 |
| PSA | VHPQWVLTAA | 51 | 10 | 2542 |
| PAP | VHTVPLSEDQL | 143 | 11 | 2543 |
| Kallikrein | VHYRKWIKDTI | 247 | 11 | 2544 |
| PSA | VHYRKWIKDTI | 243 | 11 | 2545 |
| PSM | VKMHIHSTNEV | 342 | 11 | 2546 |
| PSM | VKNAQLAGA | 214 | 9 | 2547 |
| PSM | VKNFTEIA | 636 | 8 | 2548 |
| PSM | VKNFTEIASKF | 636 | 11 | 2549 |
| PSM | VKRQIYVA | 728 | 8 | 2550 |
| PSM | VKRQIYVAA | 728 | 9 | 2551 |
| PSM | VKRQIYVAAF | 728 | 10 | 2552 |
| PSM | VKSYPDGW | 239 | 8 | 2553 |
| PSM | VKSYPDGWNL | 239 | 10 | 2554 |
| PSM | VRGGMVFEL | 579 | 9 | 2555 |
| PSM | VRGGMVFELA | 579 | 10 | 2556 |
| PSM | WKEFGLDSV | 100 | 9 | 2557 |
| PSM | WKEFGLDSVEL | 100 | 11 | 2558 |
| PSM | WRGSLKVPY | 319 | 9 | 2559 |
| PSM | WRGSLKVPYNV | 319 | 11 | 2560 |
| PSM | WRPRRTIL | 410 | 8 | 2561 |
| PSM | WRPRRTILF | 410 | 9 | 2562 |
| PSM | WRPRRTILFA | 410 | 10 | 2563 |
| PSM | YHLTVAQV | 572 | 8 | 2564 |
| PSM | YHSVYETY | 552 | 8 | 2565 |
| PSM | YHSVYETYEL | 552 | 10 | 2566 |
| PSM | YHSVYETYELV | 552 | 11 | 2567 |
| PAP | YKDFIATL | 184 | 8 | 2568 |
| PAP | YKDFIATLGKL | 184 | 11 | 2569 |
| PAP | YKHEQVYI | 97 | 8 | 2570 |
| PAP | YKKLIMYSA | 280 | 9 | 2571 |
| PAP | YRKFLNESY | 89 | 9 | 2572 |
| Kallikrein | YRKWIKDTI | 249 | 9 | 2573 |
| PSA | YRKWIKDTI | 245 | 9 | 2574 |
| Kallikrein | YRKWIKDTIA | 249 | 10 | 2575 |
| Kallikrein | YRKWIKDTIAA | 249 | 11 | 2576 |
| PSA | YRKWIKDTIV | 245 | 10 | 2577 |
| PSA | YRKWIKDTIVA | 245 | 11 | 2578 |
| PAP | YRNETQHEPY | 331 | 10 | 2579 |
| PSM | YRRGIAEA | 279 | 8 | 2580 |
| PSM | YRRGIAEAV | 279 | 9 | 2581 |
| PSM | YRRGIAEAVGL | 279 | 11 | 2582 |

[0446] TABLE XIII
Prostate B58 Supermotif with Binding Data

| | | | | |
|---|---|---|---|---|
| | | | No. of | Seq. |
| | | | Amino | Id. |
| Protein | Sequence | Position | Acids | No. |

| | | | | |
|---|---|---|---|---|
| PSM | AAAETLSEV | 741 | 9 | 2583 |
| PSM | AAAETLSEVA | 741 | 10 | 2584 |
| PSM | AAETLSEV | 742 | 8 | 2585 |
| PSM | AAETLSEVA | 742 | 9 | 2586 |
| PSM | AAFTVQAA | 735 | 8 | 2587 |
| PSM | AAFTVQAAA | 735 | 9 | 2588 |
| PSA | AAHCIRNKSV | 59 | 10 | 2589 |
| PSA | AAHCIRNKSVI | 59 | 11 | 2590 |
| Kallikrein | AAHCLKKNSQV | 63 | 11 | 2591 |
| PAP | AALFPPEGV | 121 | 9 | 2592 |
| PAP | AALFPPEGVSI | 121 | 11 | 2593 |
| PSA | AAPLILSRI | 13 | 9 | 2594 |
| PSA | AAPLILSRIV | 13 | 10 | 2595 |
| PAP | AAPLLLARA | 3 | 9 | 2596 |
| PAP | AAPLLLARAA | 3 | 10 | 2597 |
| PAP | AASLSLGF | 11 | 8 | 2598 |
| PAP | AASLSLGFL | 11 | 9 | 2599 |
| PAP | AASLSLGFLF | 11 | 10 | 2600 |
| PAP | AASLSLGFLFL | 11 | 11 | 2601 |
| PSM | AAVVHEIV | 392 | 8 | 2602 |
| PSM | AAVVHEIVRSF | 392 | 11 | 2603 |
| PAP | ASCHLTEL | 311 | 8 | 2604 |
| PAP | ASCHLTELY | 311 | 9 | 2605 |
| PAP | ASCHLTELYF | 311 | 10 | 2606 |
| PSM | ASGRARYTKNW | 531 | 11 | 2607 |
| PSM | ASKFSERL | 643 | 8 | 2608 |
| PSM | ASKFSERLQDF | 643 | 11 | 2609 |
| PAP | ASLSLGFL | 12 | 8 | 2610 |
| PAP | ASLSLGFLF | 12 | 9 | 2611 |
| PAP | ASLSLGFLFL | 12 | 10 | 2612 |
| PAP | ASLSLGFLFLL | 12 | 11 | 2613 |
| PSA | ASRGRAVCGGV | 39 | 11 | 2614 |
| PSM | ASWDAEEF | 419 | 8 | 2615 |
| PSM | ASWDAEEFGL | 419 | 10 | 2616 |
| PSM | ASWDAEEFGLL | 419 | 11 | 2617 |
| PSM | ATARRPRW | 13 | 8 | 2618 |
| PSM | ATARRPRWL | 13 | 9 | 2619 |
| PSM | ATARRPRWLCA | 13 | 11 | 2620 |
| PAP | ATEDTMTKL | 227 | 9 | 2621 |
| PAP | ATLGKLSGL | 189 | 9 | 2622 |
| PSM | ATNITPKHNM | 49 | 10 | 2623 |
| PAP | ATQIPSYKKL | 274 | 10 | 2624 |
| PAP | ATQIPSYKKLI | 274 | 11 | 2625 |
| PSM | CAGALVLA | 22 | 8 | 2626 |
| PSM | CAGALYLAGGF | 22 | 11 | 2627 |
| Kallikrein | CALPEKPA | 234 | 8 | 2628 |
| Kallikrein | CALPEKPAV | 234 | 9 | 2629 |
| Kallikrein | CALPEKPAVY | 234 | 10 | 2630 |
| PSA | CALPERPSL | 230 | 9 | 2631 |
| PSA | CALPERPSLY | 230 | 10 | 2632 |
| PSA | CAQVHPQKV | 180 | 9 | 2633 |
| Kallikrein | CARAYSEKV | 184 | 9 | 2634 |
| PSA | CSGDSGGPL | 205 | 9 | 2635 |
| PSA | CSGDSGGPLV | 205 | 10 | 2636 |
| PSM | CSGKIVIA | 196 | 8 | 2637 |
| PSM | CSGKIVIARY | 196 | 10 | 2638 |
| PAP | CSPSCPLERF | 347 | 10 | 2639 |
| PAP | CSPSCPLERFA | 347 | 11 | 2640 |
| Kallikrein | CTGAVPLI | 14 | 8 | 2641 |
| PSM | CTPLMYSL | 466 | 8 | 2642 |
| PSM | GTPLMYSLV | 466 | 9 | 2643 |
| PSM | DAEEFGLL | 422 | 8 | 2644 |
| PSM | DALFDIESKV | 710 | 10 | 2645 |
| PSM | DAQKLLEKM | 301 | 9 | 2646 |
| PSA | DAVKVMDL | 130 | 8 | 2647 |
| Kallikrein | DSGGPLVCNGV | 212 | 11 | 2648 |
| PSA | DSGGPLVCNGV | 208 | 11 | 2649 |
| PSM | DSLFSAVKNF | 630 | 10 | 2650 |
| Kallikrein | DSSHDLML | 116 | 8 | 2651 |
| PSA | DSSHDLML | 112 | 8 | 2652 |
| Kallikrein | DSSHDLMLL | 116 | 9 | 2653 |
| PSA | DSSHDLMLL | 112 | 9 | 2654 |
| Kallikrein | DSSHDLMLLRL | 116 | 11 | 2655 |
| PSA | DSSHDLMLLRL | 112 | 11 | 2656 |
| PSM | DSSIEGNY | 453 | 8 | 2657 |
| PSM | DSSIEGNYTL | 453 | 10 | 2658 |
| PSM | DSSWRGSL | 316 | 8 | 2659 |
| PSM | DSSWRGSLKV | 316 | 10 | 2660 |
| PSM | DSVELAHY | 106 | 8 | 2661 |
| PSM | DSVELAHYDV | 106 | 10 | 2662 |
| PSM | DSVELAHYDVL | 106 | 11 | 2663 |
| PSM | DSWVFGGI | 379 | 8 | 2664 |
| Kallikrein | DTCGGDSGGPL | 207 | 11 | 2665 |
| PAP | DTFPTDPI | 51 | 8 | 2666 |
| Kallikrein | DTGQRVPV | 85 | 8 | 2667 |
| PSA | DTGQVFQV | 81 | 8 | 2668 |
| PAP | DTMTKLREL | 230 | 9 | 2669 |
| PAP | DTTVSGLQM | 290 | 9 | 2670 |
| PAP | DTTVSGLQMA | 290 | 10 | 2671 |
| PAP | DTTVSGLQMAL | 290 | 11 | 2672 |
| PSM | EATNITPKHNM | 48 | 11 | 2673 |
| PSM | EAVGLPSI | 285 | 8 | 2674 |
| PSM | EAVGLPSIPV | 285 | 10 | 2675 |
| PAP | ESETLKSEEF | 168 | 10 | 2676 |
| PSM | ESFPGIYDA | 703 | 9 | 2677 |
| PSM | ESFPGIYDAL | 703 | 10 | 2678 |
| PSM | ESFPGIYDALF | 703 | 11 | 2679 |
| PSM | ESKVDPSKA | 716 | 9 | 2680 |
| PSM | ESKVDPSKAW | 716 | 10 | 2681 |
| PAP | ESSWPQGF | 60 | 8 | 2682 |
| PAP | ESSWPQGFGQL | 60 | 11 | 2683 |
| PAP | ESVHNFTL | 216 | 8 | 2684 |
| PAP | ESVHNFTLPSW | 216 | 11 | 2685 |
| PAP | ESYKHEQV | 95 | 8 | 2686 |
| PAP | ESYKHEQVY | 95 | 9 | 2687 |
| PAP | ESYKHEQVYI | 95 | 10 | 2688 |
| PSM | ETDSAVATA | 7 | 9 | 2689 |
| PAP | ETLKSEEF | 170 | 8 | 2690 |
| PSM | ETNKFSGY | 542 | 8 | 2691 |
| PSM | ETNKFSGYPL | 542 | 10 | 2692 |
| PSM | ETNKFSGYPLY | 542 | 11 | 2693 |
| PAP | ETQHEPYPL | 334 | 9 | 2694 |
| PAP | ETQHEPYPLM | 334 | 10 | 2695 |
| PAP | ETQHEPYPLML | 334 | 11 | 2696 |
| PSM | ETYELVEKF | 557 | 9 | 2697 |
| PSM | ETYELVEKFY | 557 | 10 | 2698 |
| PAP | FAELVGPV | 356 | 8 | 2699 |
| PAP | FAELVGPVI | 356 | 9 | 2700 |
| PSM | FAPGVKSY | 235 | 8 | 2701 |
| PSM | FASWDAEEF | 418 | 9 | 2702 |
| PSM | FASWDAEEFGL | 418 | 11 | 2703 |
| PSM | FSAFSPQGM | 161 | 9 | 2704 |
| PSM | FSAVKNFTEI | 633 | 10 | 2705 |
| PSM | FSAVKNFTEIA | 633 | 11 | 2706 |
| PSM | FSERLQDF | 646 | 8 | 2707 |
| PSM | FSGMPRISKL | 506 | 10 | 2708 |
| PSM | FSGYPLYHSV | 546 | 10 | 2709 |
| PSM | FSGYPLYHSVY | 546 | 11 | 2710 |
| PSM | FSPQGMPEGDL | 164 | 11 | 2711 |
| PSM | FSTQKVKM | 337 | 8 | 2712 |
| PSM | FSTQKVKMHI | 337 | 10 | 2713 |
| PSM | FTEIASKF | 639 | 8 | 2714 |
| PSM | FTGNFSTQKV | 333 | 10 | 2715 |
| PSM | FTQIPHLA | 77 | 8 | 2716 |
| PSM | FTVQAAAETL | 737 | 10 | 2717 |
| PSA | GAAPLILSRI | 12 | 10 | 2718 |
| PSA | GAAPLILSRIV | 12 | 11 | 2719 |
| PSM | GAAVVHEI | 391 | 8 | 2720 |
| PSM | GAAVVHEIV | 391 | 9 | 2721 |
| PSM | GAGDPLTPGY | 263 | 10 | 2722 |
| PSM | GAKGVILY | 221 | 8 | 2723 |
| PSM | GALVLAGGF | 24 | 9 | 2724 |
| PSM | GALVLAGGFF | 24 | 10 | 2725 |
| PSM | GALVLAGGFFL | 24 | 11 | 2726 |
| PSM | GAVEPDRY | 364 | 8 | 2727 |
| PSM | GAVEPDRYV | 364 | 9 | 2728 |
| PSM | GAVEPDRYVI | 364 | 10 | 2729 |
| PSM | GAVEPDRYVIL | 364 | 11 | 2730 |
| Kallikrein | GAVPLIQSRI | 16 | 10 | 2731 |
| Kallikrein | GAVPLIQSRIV | 16 | 11 | 2732 |
| PSM | GSAPPDSSW | 311 | 9 | 2733 |
| PSM | GSGNDFEV | 516 | 8 | 2734 |
| PSM | GSGNDFEVF | 516 | 9 | 2735 |
| PSM | GSGNDFEVFF | 516 | 10 | 2736 |
| Kallikrein | GSIEPEEF | 158 | 8 | 2737 |
| PSA | GSIEPEEF | 154 | 8 | 2738 |
| Kallikrein | GSIEPEEFL | 158 | 9 | 2739 |
| PSA | GSIEPEEFL | 154 | 9 | 2740 |
| PSM | GSLKVPYNV | 321 | 9 | 2741 |
| PSM | GTEQNFQL | 85 | 8 | 2742 |
| PSM | GTEQNFQLA | 85 | 9 | 2743 |
| PSM | GTLKKEGW | 403 | 8 | 2744 |
| Kallikrein | GTTCYASGW | 149 | 9 | 2745 |
| PSA | GTTCYASGW | 145 | 9 | 2746 |
| Kallikrein | HSFPHPLY | 94 | 8 | 2747 |
| PSA | HSFPHPLY | 90 | 8 | 2748 |
| PSA | HSFPHPLYDM | 90 | 10 | 2749 |
| Kallikrein | HSFPHPLYNM | 94 | 10 | 2750 |
| Kallikrein | HSQPWQVA | 34 | 8 | 2751 |
| Kallikrein | HSQPWQVAV | 34 | 9 | 2752 |
| Kallikrein | HSQPWQVAVY | 34 | 10 | 2753 |
| PSA | HSQPWQVL | 30 | 8 | 2754 |
| PSA | HSQPWQVLV | 30 | 9 | 2755 |
| PSA | HSQPWQVLVA | 30 | 10 | 2756 |
| PSM | HSTNEVTRI | 347 | 9 | 2757 |
| PSM | HSTNEVTRIY | 347 | 10 | 2758 |
| PSM | HSVYETYEL | 553 | 9 | 2759 |
| PSM | HSVYETYELV | 553 | 10 | 2760 |
| PAP | HTVPLSEDQL | 144 | 10 | 2761 |
| PAP | HTVPLSEDQLL | 144 | 11 | 2762 |
| PSM | IAEAVGLPSI | 283 | 10 | 2763 |
| Kallikrein | IALSVGCTGA | 8 | 10 | 2764 |
| Kallikrein | IALSVGCTGAV | 8 | 11 | 2765 |
| PSM | IARYGKVF | 202 | 8 | 2766 |
| PSM | IASGRARY | 530 | 8 | 2767 |
| PSM | IASKFSERL | 642 | 9 | 2768 |
| PAP | IATLGKLSGL | 188 | 10 | 2769 |
| PSM | ISIINEDGNEI | 128 | 11 | 2770 |
| PSM | ISKLGSGNDF | 512 | 10 | 2771 |
| PSM | ISMKHPQEM | 614 | 9 | 2772 |
| PSA | ISNDVCAQV | 175 | 9 | 2773 |
| Kallikrein | ITDVVKVL | 132 | 8 | 2774 |
| Kallikrein | ITDVVKVLGL | 132 | 10 | 2775 |
| PSM | ITPKHNMKA | 52 | 9 | 2776 |
| PSM | ITPKHNMKAF | 52 | 10 | 2777 |
| PSM | ITPKHNMKAFL | 52 | 11 | 2778 |
| Kallikrein | ITSWGPEPCA | 226 | 10 | 2779 |
| Kallikrein | ITSWGPEPCAL | 226 | 11 | 2780 |
| PSA | ITSWGSEPCA | 222 | 10 | 2781 |
| PSA | ITSWGSEPCAL | 222 | 11 | 2782 |
| PSM | KAENIKKF | 66 | 8 | 2783 |
| PSM | KAENIKKFL | 66 | 9 | 2784 |
| PSM | KAENIKKFLY | 66 | 10 | 2785 |
| PSM | KAFLDELKA | 59 | 9 | 2786 |
| PSM | KAWGEVKRQI | 723 | 10 | 2787 |
| PSM | KAWGEVKRQIY | 723 | 11 | 2788 |
| PAP | KSEEFQKRL | 173 | 9 | 2789 |
| PSM | KSNPIVLRM | 655 | 9 | 2790 |
| PSM | KSNPIVLRMM | 655 | 10 | 2791 |
| PSM | KSPSPEFSGM | 500 | 10 | 2792 |
| PAP | KSRLQGGV | 255 | 8 | 2793 |
| PAP | KSRLQGGVL | 255 | 9 | 2794 |
| PAP | KSRLQGGVLV | 255 | 10 | 2795 |
| PSM | KSSNEATNI | 44 | 9 | 2796 |
| PSA | KSVILLGRHSL | 66 | 11 | 2797 |
| PSM | KSYPDGWNL | 240 | 9 | 2798 |
| PSM | KTHPNYISI | 122 | 9 | 2799 |
| PSM | KTHPNYISII | 122 | 10 | 2800 |
| PSM | KTYSVSFDSL | 623 | 10 | 2801 |
| PSM | KTYSVSFDSLF | 623 | 11 | 2802 |
| PAP | LAALFPPEGV | 120 | 10 | 2803 |
| PSM | LAGAKGVI | 219 | 8 | 2804 |
| PSM | LAGAKGVIL | 219 | 9 | 2805 |
| PSM | LAGAKGVILY | 219 | 10 | 2806 |
| PSM | LAGGFFLL | 28 | 8 | 2807 |
| PSM | LAGGFFLLGF | 28 | 10 | 2808 |
| PSM | LAGGFFLLGFL | 28 | 11 | 2809 |
| PSM | LAGTEQNF | 83 | 8 | 2810 |
| PSM | LAGTEQNFQL | 83 | 10 | 2811 |
| PSM | LAGTEQNFQLA | 83 | 11 | 2812 |
| PSM | LAHYDVLL | 110 | 8 | 2813 |
| PSM | LAHYDVLLSY | 110 | 10 | 2814 |
| PAP | LAKELKFV | 31 | 8 | 2815 |
| PAP | LAKELKFVTL | 31 | 10 | 2816 |
| PAP | LAKELKFVTLV | 31 | 11 | 2817 |
| PSM | LAKQIQSQW | 92 | 9 | 2818 |
| PSM | LANSIVLPF | 587 | 9 | 2819 |
| PAP | LARAASLSL | 8 | 9 | 2820 |
| PAP | LARAASLSLGF | 8 | 11 | 2821 |
| PAP | LSEDQLLY | 148 | 8 | 2822 |
| PAP | LSEDQLLYL | 148 | 9 | 2823 |
| PAP | LSEDQLLYLPF | 148 | 11 | 2824 |
| PAP | LSELSLLSL | 238 | 9 | 2825 |
| PAP | LSELSLLSLY | 238 | 10 | 2826 |
| PSA | LSEPAELTDA | 122 | 10 | 2827 |
| PSA | LSEPAELTDAV | 122 | 11 | 2828 |
| Kallikrein | LSEPAKITDV | 126 | 10 | 2829 |
| Kallikrein | LSEPAKITDVV | 126 | 11 | 2830 |
| PAP | LSGLHGQDL | 194 | 9 | 2831 |
| PAP | LSGLHGQDLF | 194 | 10 | 2832 |
| PAP | LSLGFLFL | 14 | 8 | 2833 |
| PAP | LSLGFLFLL | 14 | 9 | 2834 |
| PAP | LSLGFLFLLF | 14 | 10 | 2835 |
| PAP | LSLGFLFLLFF | 14 | 11 | 2836 |
| PAP | LSLLSLYGI | 241 | 9 | 2837 |
| Kallikrein | LSNDMCARA | 179 | 9 | 2838 |
| Kallikrein | LSNDMCARAY | 179 | 10 | 2839 |
| PSA | LSRIVGGW | 18 | 8 | 2840 |
| Kallikrein | LSVGCTGA | 10 | 8 | 2841 |
| Kallikrein | LSVGCTGAV | 10 | 9 | 2842 |
| Kallikrein | LSVGCTGAVPL | 10 | 11 | 2843 |
| PSA | LSVTWIGA | 6 | 8 | 2844 |
| PSA | LSVTWIGAA | 6 | 9 | 2845 |
| PSA | LSVTWIGAAPL | 6 | 11 | 2846 |
| PSM | LSYPNKTHPNY | 117 | 11 | 2847 |
| PSA | LTDAVKVM | 128 | 8 | 2848 |
| PSA | LTDAVKVMDL | 128 | 10 | 2849 |
| PAP | LTELYFEKGEY | 315 | 11 | 2850 |
| PSA | LTLSVTWI | 4 | 8 | 2851 |
| PSA | LTLSVTWIGA | 4 | 10 | 2852 |
| PSA | LTLSVTWIGAA | 4 | 11 | 2853 |
| PSM | LTPGYPANEY | 268 | 10 | 2854 |
| PSM | LTPGYPANEYA | 268 | 11 | 2855 |
| PSA | LTPKKLQCV | 162 | 9 | 2856 |
| PSA | LTPKKLQCVDL | 162 | 11 | 2857 |
| PAP | LTQLGMEQHY | 70 | 10 | 2858 |
| PSM | LTVAQVRGGM | 574 | 10 | 2859 |
| PSM | LTVAQVRGGMV | 574 | 11 | 2860 |
| PAP | MALDVYNGL | 298 | 9 | 2861 |
| PAP | MALDVYNGLL | 298 | 10 | 2862 |
| PAP | MSAMTNLA | 114 | 8 | 2863 |
| PAP | MSAMTNLAA | 114 | 9 | 2864 |
| PAP | MSAMTNLAAL | 114 | 10 | 2865 |
| PAP | MSAMTNLAALF | 114 | 11 | 2866 |
| Kallikrein | MSLLKHQSL | 103 | 9 2867 | |
| PSA | MSLLKNRF | 99 | 8 | 2868 |
| PSA | MSLLKNRFL | 99 | 9 | 2869 |
| PAP | MTKLRELSEL | 232 | 10 | 2870 |
| PAP | MTNLAALF | 117 | 8 | 2871 |
| PSM | NADSSIEGNY | 451 | 10 | 2872 |
| PSM | NAQLAGAKGV | 216 | 10 | 2873 |
| PSM | NAQLAGAKGVI | 216 | 11 | 2874 |
| Kallikrein | NSQVWLGRHNL | 70 | 11 | 2875 |
| PSM | NSRLLQERGV | 438 | 10 | 2876 |
| PSM | NSRLLQERGVA | 438 | 11 | 2877 |
| PSM | PADYFAPGV | 231 | 9 | 2878 |
| PSA | PAELTDAV | 125 | 8 | 2879 |
| PSA | PAELTDAVKV | 125 | 10 | 2880 |
| PSA | PAELTDAVKVM | 125 | 11 | 2881 |
| Kallikrein | PAKITDVV | 129 | 8 | 2882 |
| Kallikrein | PAKITDVVKV | 129 | 10 | 2883 |
| Kallikrein | PAKITDVVKVL | 129 | 11 | 2884 |
| Kallikrein | PALGTTCY | 146 | 8 | 2885 |
| PSA | PALGTTCY | 142 | 8 | 2886 |
| Kallikrein | PALGTTCYA | 146 | 9 | 2887 |
| PSA | PALGTTCYA | 142 | 9 | 2888 |
| PSM | PANEYAYRRGI | 273 | 11 | 2889 |
| Kallikrein | PAVYTKVV | 240 | 8 | 2890 |
| Kallikrein | PAVYTKVVHY | 240 | 10 | 2891 |
| PAP | PSCPLERF | 349 | 8 | 2892 |
| PAP | PSCPLERFA | 349 | 9 | 2893 |
| PAP | PSCPLERFAEL | 349 | 11 | 2894 |
| PSM | PSIPVHPI | 290 | 8 | 2895 |
| PSM | PSIPVHPIGY | 290 | 10 | 2896 |
| PSM | PSIPVHPIGYY | 290 | 11 | 2897 |
| PSM | PSKAWGEV | 721 | 8 | 2898 |
| PSA | PSLYTKVV | 236 | 8 | 2899 |
| PSA | PSLYTKVVHY | 236 | 10 | 2900 |
| PSM | PSPEFSGM | 502 | 8 | 2901 |
| PSM | PSPEFSGMPRI | 502 | 11 | 2902 |
| PSM | PSSHNKYA | 694 | 8 | 2903 |
| PAP | PSWATEDTM | 224 | 9 | 2904 |
| PAP | PSYKKLIM | 278 | 8 | 2905 |
| PAP | PSYKKLIMY | 278 | 9 | 2906 |
| PAP | PSYKKLIMYSA | 278 | 11 | 2907 |
| PAP | PTDPIKESSW | 54 | 10 | 2908 |
| PSM | QAAAETLSEV | 740 | 10 | 2909 |
| PSM | QAAAETLSEVA | 740 | 11 | 2910 |
| PSM | QSGAAVVHEI | 389 | 10 | 2911 |
| PSM | QSGAAVVHEIV | 389 | 11 | 2912 |
| PSM | QSQWKEFGL | 97 | 9 | 2913 |
| Kallikrein | QSRIVGGW | 22 | 8 | 2914 |
| PAP | RAAPLLLA | 2 | 8 | 2915 |
| PAP | RAAPLLLARA | 2 | 10 | 2916 |
| PAP | RAAPLLLARAA | 2 | 11 | 2917 |
| PAP | RAASLSLGF | 10 | 9 | 2918 |
| PAP | RAASLSLGFL | 10 | 10 | 2919 |
| PAP | RAASLSLGFLF | 10 | 11 | 2920 |
| PSM | RAFIDPLGL | 673 | 9 | 2921 |
| PSM | RARYTKNW | 534 | 8 | 2922 |
| PAP | RATQIPSY | 273 | 8 | 2923 |
| PAP | RATQIPSYKKL | 273 | 11 | 2924 |
| PSA | RAVCGGVL | 43 | 8 | 2925 |
| PSA | RAVCGGVLV | 43 | 9 | 2926 |
| Kallikrein | RAYSEKVTEF | 186 | 10 | 2927 |
| Kallikrein | RAYSEKVTEFM | 186 | 11 | 2928 |
| PSM | RSFGTLKKEGW | 400 | 11 | 2929 |
| Kallikrein | RSLQCVSL | 169 | 8 | 2930 |
| Kallikrein | RSLQCVSLHL | 169 | 10 | 2931 |
| Kallikrein | RSLQCVSLHLL | 169 | 11 | 2932 |
| PAP | RSTDVDRTL | 105 | 9 | 2933 |
| PAP | RSTDVDRTLM | 105 | 10 | 2934 |
| PAP | RSVLAKEL | 28 | 8 | 2935 |
| PAP | RSVLAKELKF | 28 | 10 | 2936 |
| PAP | RSVLAKELKFV | 28 | 11 | 2937 |
| PSM | RTEDFFKL | 181 | 8 | 2938 |
| PSM | RTILFASW | 414 | 8 | 2939 |
| PSM | RTILFASWDA | 414 | 10 | 2940 |
| PAP | RTLMSAMTNL | 111 | 10 | 2941 |
| PAP | RTLMSAMTNLA | 111 | 11 | 2942 |
| PSM | SAFSPQGM | 162 | 8 | 2943 |
| PAP | SAHDTTVSGL | 287 | 10 | 2944 |
| PAP | SAMTNLAA | 115 | 8 | 2945 |
| PAP | SAMTNLAAL | 115 | 9 | 2946 |
| PAP | SAMTNLAALF | 115 | 10 | 2947 |
| PSM | SAPPDSSW | 312 | 8 | 2948 |
| PSM | SAVATARRPRW | 10 | 11 | 2949 |
| PSM | SAVKNFTEI | 634 | 9 | 2950 |
| PSM | SAVKNFTEIA | 634 | 10 | 2951 |
| Kallikrein | SSHDLMLL | 117 | 8 | 2952 |
| PSA | SSHDLMLL | 113 | 8 | 2953 |
| Kallikrein | SSHDLMLLRL | 117 | 10 | 2954 |
| PSA | SSHDLMLLRL | 113 | 10 | 2955 |
| PSM | SSHNKYAGESF | 695 | 11 | 2956 |
| PSM | SSIEGNYTL | 454 | 9 | 2957 |
| PSM | SSIEGNYTLRV | 454 | 11 | 2958 |
| PSM | SSNEATNI | 45 | 8 | 2959 |
| PAP | SSWPQGFGQL | 61 | 10 | 2960 |
| PSM | SSWRGSLKV | 317 | 9 | 2961 |
| PSM | SSWRGSLKVPY | 317 | 11 | 2962 |
| PSA | STCSGDSGGPL | 203 | 11 | 2963 |
| PAP | STDVDRTL | 106 | 8 | 2964 |
| PAP | STDVDRTLM | 106 | 9 | 2965 |
| PAP | STDVDRTLMSA | 106 | 11 | 2966 |
| PSM | STEWAEENSRL | 431 | 11 | 2967 |
| PSM | STNEVTRI | 348 | 8 | 2968 |
| PSM | STNEVTRIY | 348 | 9 | 2969 |
| PSM | STNEVTRIYNV | 348 | 11 | 2970 |
| PSM | STQKVKMHI | 338 | 9 | 2971 |
| PSA | TAAHCIRNKSV | 58 | 11 | 2972 |
| PSM | TARRPRWL | 14 | 8 | 2973 |
| PSM | TARRPRWLCA | 14 | 10 | 2974 |
| PSM | TSLFEPPPPGY | 141 | 11 | 2975 |
| Kallikrein | TSWGPEPCA | 227 | 9 | 2976 |
| Kallikrein | TSWGPEPCAL | 227 | 10 | 2977 |
| PSA | TSWGSEPCA | 223 | 9 | 2978 |
| PSA | TSWGSEPCAL | 223 | 10 | 2979 |
| Kallikrein | TTCYASGW | 150 | 8 | 2980 |
| PSA | TTCYASGW | 146 | 8 | 2981 |
| Kallikrein | TTCYASGWGSI | 150 | 11 | 2982 |
| PSA | TTCYASGWGSI | 146 | 11 | 2983 |
| PAP | TTVSGLQM | 291 | 8 | 2984 |
| PAP | TTVSGLQMA | 291 | 9 | 2985 |
| PAP | TTVSGLQMAL | 291 | 10 | 2986 |
| PSM | VAAFTVQA | 734 | 8 | 2987 |
| PSM | VAAFTVQAA | 734 | 9 | 2988 |
| PSM | VAAFTVQAAA | 734 | 10 | 2989 |
| PSM | VAQVRGGM | 576 | 8 | 2990 |
| PSM | VAQVRGGMV | 576 | 9 | 2991 |
| PSM | VAQVRGGMVF | 576 | 10 | 2992 |
| PSA | VASRGRAV | 38 | 8 | 2993 |
| PSM | VATARRPRW | 12 | 9 | 2994 |
| PSM | VATARRPRWL | 12 | 10 | 2995 |
| Kallikrein | VAVYSHGW | 40 | 8 | 2996 |
| Kallikrein | VAVYSHGWA | 40 | 9 | 2997 |
| PSM | VAYINADSSI | 447 | 10 | 2998 |
| PSM | VSDIVPPF | 154 | 8 | 2999 |
| PSM | VSDIVPPFSA | 154 | 10 | 3000 |
| PSM | VSDIVPPFSAF | 154 | 11 | 3001 |
| PSM | VSFDSLFSA | 627 | 9 | 3002 |
| PSM | VSFDSLFSAV | 627 | 10 | 3003 |
| PAP | VSGLQMAL | 293 | 8 | 3004 |
| PAP | VSGLQMALDV | 293 | 10 | 3005 |
| PAP | VSGLQMALDVY | 293 | 11 | 3006 |
| Kallikrein | VSHSFPHPL | 92 | 9 | 3007 |
| PSA | VSHSFPHPL | 88 | 9 | 3008 |
| Kallikrein | VSHSFPHPLY | 92 | 10 | 3009 |
| PSA | VSHSFPHPLY | 88 | 10 | 3010 |
| PAP | VSIWNPIL | 129 | 8 | 3011 |
| PAP | VSIWNPILL | 129 | 9 | 3012 |
| PAP | VSIWNPILLW | 129 | 10 | 3013 |
| Kallikrein | VSLHLLSNDM | 174 | 10 | 3014 |
| Kallikrein | VTEFMLCA | 192 | 8 | 3015 |
| Kallikrein | VTEFMLCAGL | 192 | 10 | 3016 |
| Kallikrein | VTEFMLCAGLW | 192 | 11 | 3017 |
| PSA | VTKFMLCA | 188 | 8 | 3018 |
| PSA | VTKFMLCAGRW | 188 | 11 | 3019 |
| PSM | VTRIYNVI | 352 | 8 | 3020 |
| PSM | VTRIYNVIGTL | 352 | 11 | 3021 |
| PSA | VTWIGAAPL | 8 | 9 | 3022 |
| PSA | VTWIGAAPLI | 8 | 10 | 3023 |
| PSA | VTWIGAAPLIL | 8 | 11 | 3024 |
| PSM | WAEENSRL | 434 | 8 | 3025 |
| PSM | WAEENSRLL | 434 | 9 | 3026 |
| Kallikrein | WAHCGGVL | 47 | 8 | 3027 |
| Kallikrein | WAHCGGVLV | 47 | 9 | 3028 |
| PAP | WATEDTMTKL | 226 | 10 | 3029 |
| PAP | WSKVYDPL | 206 | 8 | 3030 |
| PAP | WSKVYDPLY | 206 | 9 | 3031 |
| PSM | WTKKSPSPEF | 497 | 10 | 3032 |
| PSM | YADKIYSI | 607 | 8 | 3033 |
| PSM | YADKIYSISM | 607 | 10 | 3034 |
| PSM | YAGESFPGI | 700 | 9 | 3035 |
| PSM | YAGESFPGIY | 700 | 10 | 3036 |
| PSM | YAPSSHNKY | 692 | 9 | 3037 |
| PSM | YAPSSHNKYA | 692 | 10 | 3038 |
| PSM | YARTEDFF | 179 | 8 | 3039 |
| PSM | YARTEDFFKL | 179 | 10 | 3040 |
| PAP | YASCHLTEL | 310 | 9 | 3041 |
| PAP | YASCHLTELY | 310 | 10 | 3042 |
| PAP | YASCHLTELYF | 310 | 11 | 3043 |
| Kallikrein | YASGWGSI | 153 | 8 | 3044 |
| PSA | YASGWGSI | 149 | 8 | 3045 |
| PSM | YAVVLRKY | 600 | 8 | 3046 |
| PSM | YAVVLRKYA | 600 | 9 | 3047 |
| PSM | YAYRRGIA | 277 | 8 | 3048 |
| PSM | YAYRRGIAEA | 277 | 10 | 3049 |
| PSM | YAYRRGIAEAV | 277 | 11 | 3050 |
| PAP | YSAHDTTV | 286 | 8 | 3051 |
| PAP | YSAHDTTVSGL | 286 | 11 | 3052 |
| PSM | YSDPADYF | 228 | 8 | 3053 |
| PSM | YSDPADYFA | 228 | 9 | 3054 |
| Kallikrein | YSEKVTEF | 188 | 8 | 3055 |
| Kallikrein | YSEKVTEFM | 188 | 9 | 3056 |
| Kallikrein | YSEKVTEFML | 188 | 10 | 3057 |
| Kallikrein | YSHGWAHCGGV | 43 | 11 | 3058 |
| PSM | YSISMKHPQEM | 612 | 11 | 3059 |
| PSM | YSLVHNLTKEL | 471 | 11 | 3060 |
| PSM | YSVSFDSL | 625 | 8 | 3061 |
| PSM | YSVSFDSLF | 625 | 9 | 3062 |
| PSM | YSVSFDSLFSA | 625 | 11 | 3063 |
| PSM | YTKNWETNKF | 537 | 10 | 3064 |
| Kallikrein | YTKVVHYRKW | 243 | 10 | 3065 |
| PSA | YTKVVHYRKW | 239 | 10 | 3066 |
| Kallikrein | YTKVVHYRKWI | 243 | 11 | 3067 |
| PSA | YTKVVHYRKWI | 239 | 11 | 3068 |
| PSM | YTLRVDCTPL | 460 | 10 | 3069 |
| PSM | YTLRVDCTPLM | 460 | 11 | 3070 |

[0447] TABLE XIV
Prostate B62 Supermotif with Binding Data

| | | | | |
|---|---|---|---|---|
| | | | No. of | Seq. |
| | | | Amino | Id. |
| Protein | Sequence | Position | Acids | No. |

| | | | | |
|---|---|---|---|---|
| PAP | ALDVYNGL | 299 | 8 | 3071 |
| PAP | ALDVYNGLL | 299 | 9 | 3072 |
| PSM | ALFDIESKV | 711 | 9 | 3073 |
| PAP | ALFPPEGV | 122 | 8 | 3074 |
| PAP | ALFPPEGVSI | 122 | 10 | 3075 |
| PAP | ALFPPEGVSTW | 122 | 11 | 3076 |
| Kallikrein | ALGTTCYA | 147 | 8 | 3077 |
| PSA | ALGTTCYA | 143 | 8 | 3078 |
| Kallikrein | ALGTTCYASGW | 147 | 11 | 3079 |
| PSA | ALGTTCYASGW | 143 | 11 | 3080 |
| Kallikrein | ALPEKPAV | 235 | 8 | 3081 |
| Kallikrein | ALPEKPAVY | 235 | 9 | 3082 |
| PSA | ALPERPSL | 231 | 8 | 3083 |
| PSA | ALPERPSLY | 231 | 9 | 3084 |
| Kallikrein | ALSVGCTGA | 9 | 9 | 3085 |
| Kallikrein | ALSVGCTGAV | 9 | 10 | 3086 |
| PSM | ALVLAGGF | 25 | 8 | 3087 |
| PSM | ALVLAGGFF | 25 | 9 | 3088 |
| PSM | ALVLAGGFFL | 25 | 10 | 3089 |
| PSM | ALVLAGGFFLL | 25 | 11 | 3090 |
| PAP | AMTNLAAL | 116 | 8 | 3091 |
| PAP | AMTNLAALF | 116 | 9 | 3092 |
| PSM | APGVKSYPDGW | 236 | 11 | 3093 |
| PSA | APLILSRI | 14 | 8 | 3094 |
| PSA | APLILSRIV | 4 | 9 | 3095 |
| PAP | APLLLARA | 4 | 8 | 3096 |
| PAP | APLLLARAA | 4 | 9 | 3097 |
| PAP | APLLLARAASL | 4 | 11 | 3098 |
| PSM | APPDSSWRGSL | 313 | 11 | 3099 |
| PSM | APSSHNKY | 693 | 8 | 3100 |
| PSM | APSSHNKYA | 693 | 9 | 3101 |
| PSM | AQKLLEKM | 302 | 8 | 3102 |
| PSM | AQLAGAKGV | 217 | 9 | 3103 |
| PSM | AQLAGAKGVI | 217 | 10 | 3104 |
| PSM | AQLAGAKGVIL | 217 | 11 | 3105 |
| PSA | AQVHPQKV | 181 | 8 | 3106 |
| PSA | AQVHPQKVTKF | 181 | 11 | 3107 |
| PSM | AQVRGGMV | 577 | 8 | 3108 |
| PSM | AQVRGGMVF | 577 | 9 | 3109 |
| PSM | AQVRGGMVFEL | 577 | 11 | 3110 |
| PSM | AVATARRPRW | 11 | 10 | 3111 |
| PSM | AVATARRPRWL | 11 | 11 | 3112 |
| PSA | AVCGGVLV | 44 | 8 | 3113 |
| PSM | AVEPDRYV | 365 | 8 | 3114 |
| PSM | AVEPDRYVI | 365 | 9 | 3115 |
| PSM | AVEPDRYVIL | 365 | 10 | 3116 |
| PSM | AVGLPSIPV | 286 | 9 | 3117 |
| PSM | AVKNFTEI | 635 | 8 | 3118 |
| PSM | AVKNFTEIA | 635 | 9 | 3119 |
| Kallikrein | AVPLIQSRI | 17 | 9 | 3120 |
| Kallikrein | AVPLIQSRIV | 17 | 10 | 3121 |
| PSM | AVVHEIVRSF | 393 | 10 | 3122 |
| PSM | AVVLRKYA | 601 | 8 | 3123 |
| PSM | AVVLRKYADKI | 601 | 11 | 3124 |
| Kallikrein | AVYSHGWA | 41 | 8 | 3125 |
| Kallikrein | AVYTKVVHY | 241 | 9 | 3126 |
| PSA | CIRNKSVI | 62 | 8 | 3127 |
| PSA | CIRNKSVIL | 62 | 9 | 3128 |
| PSA | CIRNKSVILL | 62 | 10 | 3129 |
| Kallikrein | CLKKNSQV | 66 | 8 | 3130 |
| Kallikrein | CLKKNSQVW | 66 | 9 | 3131 |
| Kallikrein | CLKKNSQVWL | 66 | 10 | 3132 |
| PAP | CPLERFAEL | 351 | 9 | 3133 |
| PAP | CPLERFAELV | 351 | 10 | 3134 |
| PSA | CVDLHVISNDV | 169 | 11 | 3135 |
| Kallikrein | CVSLHLLSNDM | 173 | 11 | 3136 |
| PSM | DIESKVDPSKA | 714 | 11 | 3137 |
| PSM | DIVPPFSA | 156 | 8 | 3138 |
| PSM | DIVPPFSAF | 156 | 9 | 3139 |
| PAP | DLFGIWSKV | 201 | 9 | 3140 |
| PAP | DLFGIWSKVY | 201 | 10 | 3141 |
| PSA | DLHVISNDV | 171 | 9 | 3142 |
| PSA | DLHVISNDVCA | 171 | 11 | 3143 |
| Kallikrein | DLMLLRLSEPA | 120 | 11 | 3144 |
| PSA | DLMLLRLSEPA | 116 | 11 | 3145 |
| PSA | DLPTQEPA | 136 | 8 | 3146 |
| PSA | DLPTQEPAL | 136 | 9 | 3147 |
| Kallikrein | DLVLSIAL | 3 | 8 | 3148 |
| Kallikrein | DLVLSIALSV | 3 | 10 | 3149 |
| PSM | DLVYVNYA | 173 | 8 | 3150 |
| Kallikrein | DMCARAYSEKV | 182 | 11 | 3151 |
| PSM | DMKINCSGKI | 191 | 10 | 3152 |
| PSM | DMKINCSGKIV | 191 | 11 | 3153 |
| PSA | DMSLLKNRF | 98 | 9 | 3154 |
| PSA | DMSLLKNRFL | 98 | 10 | 3155 |
| PSM | DPADYFAPGV | 230 | 10 | 3156 |
| PAP | DPIKESSW | 56 | 8 | 3157 |
| PSM | DPLGLPDRPF | 677 | 10 | 3158 |
| PSM | DPLGLPDRPFY | 677 | 11 | 3159 |
| PSM | DPLTPGYPA | 266 | 9 | 3160 |
| PAP | DPLYCESV | 211 | 8 | 3161 |
| PAP | DPLYCESVHNF | 211 | 11 | 3162 |
| PSM | DPMFKYHL | 567 | 8 | 3163 |
| PSM | DPMFKYHLTV | 567 | 10 | 3164 |
| PSM | DPMFKYHLTVA | 567 | 11 | 3165 |
| PSM | DPQSGAAV | 387 | 8 | 3166 |
| PSM | DPQSGAAVV | 387 | 9 | 3167 |
| PSM | DPSKAWGEV | 720 | 9 | 3168 |
| PAP | DQLLYLPF | 151 | 8 | 3169 |
| PSM | DQLMFLERA | 666 | 9 | 3170 |
| PSM | DQLMFLERAF | 666 | 10 | 3171 |
| PSM | DQLMFLERAFI | 666 | 11 | 3172 |
| PSA | DVCAQVHPQKV | 178 | 11 | 3173 |
| PAP | DVDRTLMSA | 108 | 9 | 3174 |
| PAP | DVDRTLMSAM | 108 | 10 | 3175 |
| Kallikrein | DVVKVLGL | 134 | 8 | 3176 |
| PAP | DVYNGLLPPY | 301 | 10 | 3177 |
| PAP | DVYNGLLPPYA | 301 | 11 | 3178 |
| PSM | EIASKFSERL | 641 | 10 | 3179 |
| PSM | EIFNTSLF | 137 | 8 | 3180 |
| PAP | EILNHMKRA | 266 | 9 | 3181 |
| PSM | EIVRSFGTL | 397 | 9 | 3182 |
| PSM | ELAHYDVL | 109 | 8 | 3183 |
| PSM | ELAHYDVLL | 109 | 9 | 3184 |
| PSM | ELAHYDVLLSY | 109 | 11 | 3185 |
| PSM | ELANSIVL | 586 | 8 | 3186 |
| PSM | ELANSIVLPF | 586 | 10 | 3187 |
| PAP | ELGEYIRKRY | 80 | 10 | 3188 |
| PSM | ELKAENIKKF | 64 | 10 | 3189 |
| PSM | ELKAENIKKFL | 64 | 11 | 3190 |
| PAP | ELKFVTLV | 34 | 8 | 3191 |
| PAP | ELKFVTLVF | 34 | 9 | 3192 |
| PSM | ELKSPDEGF | 480 | 9 | 3193 |
| PAP | ELSELSLL | 237 | 8 | 3194 |
| PAP | ELSELSLLSL | 237 | 10 | 3195 |
| PAP | ELSELSLLSLY | 237 | 11 | 3196 |
| PAP | ELSLLSLY | 240 | 8 | 3197 |
| PAP | ELSLLSLYGI | 240 | 10 | 3198 |
| PSA | ELTDAVKV | 127 | 8 | 3199 |
| PSA | ELTDAVKVM | 127 | 9 | 3200 |
| PSA | ELTDAVKVMDL | 127 | 11 | 3201 |
| PSM | ELVEKFYDPM | 560 | 10 | 3202 |
| PSM | ELVEKFYDPMF | 560 | 11 | 3203 |
| PAP | ELVGPVIPQDW | 358 | 11 | 3204 |
| PAP | ELYFEKGEY | 317 | 9 | 3205 |
| PAP | ELYFEKGEYF | 317 | 10 | 3206 |
| PAP | ELYFEKGEYFV | 317 | 11 | 3207 |
| PSM | EMKTYSVSF | 621 | 9 | 3208 |
| PSA | EPAELTDA | 124 | 8 | 3209 |
| PSA | EPAELTDAV | 124 | 9 | 3210 |
| PSA | EPAELTDAVKV | 124 | 11 | 3211 |
| Kallikrein | EPAKITDV | 128 | 8 | 3212 |
| Kallikrein | EPAKITDVV | 128 | 9 | 3213 |
| Kallikrein | EPAKITDVVKV | 128 | 11 | 3214 |
| Kallikrein | EPALGTTCY | 145 | 9 | 3215 |
| PSA | EPALGTTCY | 141 | 9 | 3216 |
| Kallikrein | EPALGTTCYA | 145 | 10 | 3217 |
| PSA | EPALGTTCYA | 141 | 10 | 3218 |
| Kallikrein | EPCALPEKPA | 232 | 10 | 3219 |
| Kallikrein | EPCALPEKPAV | 232 | 11 | 3220 |
| PSA | EPCALPERPSL | 228 | 11 | 3221 |
| PSM | EPDRYVIL | 367 | 8 | 3222 |
| Kallikrein | EPEDTGQRV | 82 | 9 | 3223 |
| Kallikrein | EPEDTGQRVPV | 82 | 11 | 3224 |
| Kallikrein | EPEEFLRPRSL | 161 | 11 | 3225 |
| PSA | EPEEFLTPKKL | 157 | 11 | 3226 |
| PSM | EPPPPGYENV | 145 | 10 | 3227 |
| PAP | EQHYELGEY | 76 | 9 | 3228 |
| PAP | EQHYELGEYI | 76 | 10 | 3229 |
| PSM | EQNFQLAKQI | 87 | 10 | 3230 |
| PAP | EQVYIRSTDV | 100 | 10 | 3231 |
| PSM | EVFFQRLGI | 522 | 9 | 3232 |
| PSM | EVFFQRLGIA | 522 | 10 | 3233 |
| PSM | EVKRQIYV | 727 | 8 | 3234 |
| PSM | EVKRQIYVA | 727 | 9 | 3235 |
| PSM | EVKRQIYVAA | 727 | 10 | 3236 |
| PSM | EVKRQIYVAAF | 727 | 11 | 3237 |
| PSM | EVTRIYNV | 351 | 8 | 3238 |
| PSM | EVTRIYNVI | 351 | 9 | 3239 |
| PAP | FIATLGKL | 187 | 8 | 3240 |
| PAP | FIATLGKLSGL | 187 | 11 | 3241 |
| PSM | FIKSSNEA | 42 | 8 | 3242 |
| PSM | FIKSSNEATNI | 42 | 11 | 3243 |
| PSM | FLDELKAENI | 61 | 10 | 3244 |
| PSM | FLERAFIDPL | 670 | 10 | 3245 |
| PAP | FLFLLFFW | 18 | 8 | 3246 |
| PAP | FLFLLFFWL | 18 | 9 | 3247 |
| PAP | FLLFFWLDRSV | 20 | 11 | 3248 |
| PSM | FLLGFLFGW | 33 | 9 | 3249 |
| PSM | FLLGFLFGWF | 33 | 10 | 3250 |
| PSM | FLLGFLFGWFI | 33 | 11 | 3251 |
| PAP | FLNESYKHEQV | 92 | 11 | 3252 |
| Kallikrein | FLRPRSLQCV | 165 | 10 | 3253 |
| PSA | FLTLSVTW | 3 | 8 | 3254 |
| PSA | FLTLSVTWI | 3 | 9 | 3255 |
| PSA | FLTLSVTWIGA | 3 | 11 | 3256 |
| PSA | FLTPKKLQCV | 161 | 10 | 3257 |
| PSM | FLYNFTQI | 73 | 8 | 3258 |
| PSM | FLYNFTQIPHL | 73 | 11 | 3259 |
| Kallikrein | FMLCAGLW | 195 | 8 | 3260 |
| PSA | FMLCAGRW | 191 | 8 | 3261 |
| PSM | FPGIYDAL | 705 | 8 | 3262 |
| PSM | FPGIYDALF | 705 | 9 | 3263 |
| PSM | FPGIYDALFDI | 705 | 11 | 3264 |
| PSA | FPHPLYDM | 92 | 8 | 3265 |
| PSA | FPHPLYDMSL | 92 | 10 | 3266 |
| PSA | FPHPLYDMSLL | 92 | 11 | 3267 |
| Kallikrein | FPHPLYNM | 96 | 8 | 3268 |
| Kallikrein | FPHPLYNMSL | 96 | 10 | 3269 |
| Kallikrein | FPHPLYNMSLL | 96 | 11 | 3270 |
| PAP | FPPEGVSI | 124 | 8 | 3271 |
| PAP | FPPEGVSIW | 124 | 9 | 3272 |
| PAP | FPTDPIKESSW | 53 | 11 | 3273 |
| PAP | FQELESETL | 164 | 9 | 3274 |
| PAP | FQKRLHPY | 177 | 8 | 3275 |
| PAP | FQKRLHPYKDF | 177 | 11 | 3276 |
| PSM | FQLAKQIQSQW | 90 | 11 | 3277 |
| PSM | FQRLGIASGRA | 525 | 11 | 3278 |
| PSA | FQVSHSEPHPL | 86 | 11 | 3279 |
| PSM | GIAEAVGL | 282 | 8 | 3280 |
| PSM | GIAEAVGLPSI | 282 | 11 | 3281 |
| PSM | GIASGRARY | 529 | 9 | 3282 |
| PSM | GIDPQSGA | 385 | 8 | 3283 |
| PSM | GIDPQSGAA | 385 | 9 | 3284 |
| PSM | GIDPQSGAAV | 385 | 10 | 3285 |
| PSM | GIDPQSGAAVV | 385 | 11 | 3286 |
| PAP | GIHKQKEKSRL | 248 | 11 | 3287 |
| Kallikrein | GITSWGPEPCA | 225 | 11 | 3288 |
| PSA | GITSWGSEPCA | 221 | 11 | 3289 |
| PAP | GIWSKVYDPL | 204 | 10 | 3290 |
| PAP | GIWSKVYDPLY | 204 | 11 | 3291 |
| PSM | GIYDALFDI | 707 | 9 | 3292 |
| PSM | GLDSVELA | 104 | 8 | 3293 |
| PSM | GLDSVELAHY | 104 | 10 | 3294 |
| PAP | GLHGQDLF | 196 | 8 | 3295 |
| PAP | GLHGQDLFGI | 196 | 10 | 3296 |
| PAP | GLHGQDLFGIW | 196 | 11 | 3297 |
| PSM | GLLGSTEW | 427 | 8 | 3298 |
| PSM | GLLGSTEWA | 427 | 9 | 3299 |
| PAP | GLLPPYASCHL | 305 | 11 | 3300 |
| PSM | GLPDRPFY | 680 | 8 | 3301 |
| PSM | GLPDRPFYRHV | 680 | 11 | 3302 |
| PSM | GLPSIPVHPI | 288 | 10 | 3303 |
| Kallikrein | GLPTQEPA | 140 | 8 | 3304 |
| Kallikrein | GLPTQEPAL | 140 | 9 | 3305 |
| PAP | GLQMALDV | 295 | 8 | 3306 |
| PAP | GLQMALDVY | 295 | 9 | 3307 |
| PAP | GMEQHYEL | 74 | 8 | 3308 |
| PAP | GMEQHYELGEY | 74 | 11 | 3309 |
| PSM | GMPEGDLV | 168 | 8 | 3310 |
| PSM | GMPEGDLVY | 168 | 9 | 3311 |
| PSM | GMPEGDLVYV | 168 | 10 | 3312 |
| PSM | GMPRISKL | 508 | 8 | 3313 |
| PSM | GMVFELANSI | 582 | 10 | 3314 |
| PSM | GMVFELANSIV | 582 | 11 | 3315 |
| PSM | GPGFTGNF | 330 | 8 | 3316 |
| Kallikrein | GPLVCNGV | 215 | 8 | 3317 |
| PSA | GPLVCNGV | 211 | 8 | 3318 |
| Kallikrein | GPLVCNGVL | 215 | 9 | 3319 |
| PSA | GPLVCNGVL | 211 | 9 | 3320 |
| PAP | GPVIPQDW | 361 | 8 | 3321 |
| PAP | GQDLFGIW | 199 | 8 | 3322 |
| PAP | GQDLFGIWSKV | 199 | 11 | 3323 |
| PAP | GQLTQLGM | 68 | 8 | 3324 |
| Kallikrein | GQRVPVSHSF | 87 | 10 | 3325 |
| PSA | GQVFQVSHSF | 83 | 10 | 3326 |
| PSM | GVAYINADSSI | 446 | 11 | 3327 |
| PSM | GVILYSDPA | 224 | 9 | 3328 |
| PSM | GVILYSDPADY | 224 | 11 | 3329 |
| PSM | GVKSYPDGW | 238 | 9 | 3330 |
| PSM | GVKSYPDGWNL | 238 | 11 | 3331 |
| Kallikrein | GVLQGITSW | 221 | 9 | 3332 |
| PSA | GVLQGITSW | 217 | 9 | 3333 |
| Kallikrein | GVLVHPQW | 52 | 8 | 3334 |
| PSA | GVLVHPQW | 48 | 8 | 3335 |
| Kallikrein | GVLVHPQWV | 52 | 9 | 3336 |
| PSA | GVLVHPQWV | 48 | 9 | 3337 |
| Kallikrein | GVLVHPQWVL | 52 | 10 | 3338 |
| PSA | GVLVHPQWVL | 48 | 10 | 3339 |
| PAP | GVLVNEIL | 261 | 8 | 3340 |
| PAP | GVLVNEILNHM | 261 | 11 | 3341 |
| PSM | GVQRGNIL | 252 | 8 | 3342 |
| PSM | GVQRGNILNL | 252 | 10 | 3343 |
| PAP | GVSIWNPI | 128 | 8 | 3344 |
| PAP | GVSIWNPIL | 128 | 9 | 3345 |
| PAP | GVSIWNPILL | 128 | 10 | 3346 |
| PAP | GVSIWNPILLW | 128 | 11 | 3347 |
| PSM | HIHSTNEV | 345 | 8 | 3348 |
| PSM | HIHSTNEVTRI | 345 | 11 | 3349 |
| PSM | HLAGTEQNF | 82 | 9 | 3350 |
| PSM | HLAGTEQNFQL | 82 | 11 | 3351 |
| Kallikrein | HLLSNDMCA | 177 | 9 | 3352 |
| Kallikrein | HLLSNDMCARA | 177 | 11 | 3353 |
| PSM | HLTVAQVRGGM | 573 | 11 | 3354 |
| PAP | HMKRATQI | 270 | 8 | 3355 |
| PAP | HMKRATQIPSY | 270 | 11 | 3356 |
| PSA | HPEDTGQV | 78 | 8 | 3357 |
| PSA | HPEDTGQVF | 78 | 9 | 3358 |
| PSA | HPEDTGQVFQV | 78 | 11 | 3359 |
| PSM | HPIGYYDA | 295 | 8 | 3360 |
| PSM | HPIGYYDAQKL | 295 | 11 | 3361 |
| PSA | HPLYDMSL | 94 | 8 | 3362 |
| PSA | HPLYDMSLL | 94 | 9 | 3363 |
| Kallikrein | HPLYNMSL | 98 | 8 | 3364 |
| Kallikrein | HPLYNMSLL | 98 | 9 | 3365 |
| PSM | HPNYISII | 124 | 8 | 3366 |
| PSM | HPQEMKTY | 618 | 8 | 3367 |
| PSM | HPQEMKTYSV | 618 | 10 | 3368 |
| PSA | HPQKVTKF | 184 | 8 | 3369 |
| PSA | HPQKVTKFM | 184 | 9 | 3370 |
| PSA | HPQKVTKFML | 184 | 10 | 3371 |
| Kallikrein | HPQWVLTA | 56 | 8 | 3372 |
| PSA | HPQWVLTA | 52 | 8 | 3373 |
| Kallikrein | HPQWVLTAA | 56 | 9 | 3374 |
| PSA | HPQWVLTAA | 52 | 9 | 3375 |
| PAP | HPYKDFIA | 182 | 8 | 3376 |
| PAP | HPYKDFIATL | 182 | 10 | 3377 |
| PSA | HVISNDVCA | 173 | 9 | 3378 |
| PSA | HVISNDVCAQV | 173 | 11 | 3379 |
| PSM | IINEDGNEI | 130 | 9 | 3380 |
| PSM | IINEDGNEIF | 130 | 10 | 3381 |
| PSM | ILFASWDA | 416 | 8 | 3382 |
| PSM | ILFASWDAEEF | 416 | 11 | 3383 |
| PSM | ILGGHRDSW | 373 | 9 | 3384 |
| PSM | ILGGHRDSWV | 373 | 10 | 3385 |
| PSM | ILGGHRDSWVF | 373 | 11 | 3386 |
| PSA | ILLGRHSL | 69 | 8 | 3387 |
| PSA | ILLGRHSLF | 69 | 9 | 3388 |
| PAP | ILLWQPIPV | 135 | 9 | 3389 |
| PAP | ILNHMKRA | 267 | 8 | 3390 |
| PAP | ILNHMKRATQI | 267 | 11 | 3391 |
| PSM | ILNLNGAGDPL | 258 | 11 | 3392 |
| PSA | ILSRIVGGW | 17 | 9 | 3393 |
| PSM | ILYSDPADY | 226 | 9 | 3394 |
| PSM | ILYSDPADYF | 226 | 10 | 3395 |
| PSM | ILYSDPADYFA | 226 | 11 | 3396 |
| PAP | IMYSAHDTTV | 284 | 10 | 3397 |
| PSM | IPHLAGTEQNF | 80 | 11 | 3398 |
| PAP | IPQDWSTECM | 364 | 10 | 3399 |
| PAP | IPSYKKLI | 277 | 8 | 3400 |
| PAP | IPSYKKLIM | 277 | 9 | 3401 |
| PAP | IPSYKKLIMY | 277 | 10 | 3402 |
| PSM | IPVHPIGY | 292 | 8 | 3403 |
| PSM | IPVHPIGYY | 292 | 9 | 3404 |
| PSM | IPVHPIGYYDA | 292 | 11 | 3405 |
| PAP | IPVHTVPL | 141 | 8 | 3406 |
| PSM | IQSQWKEF | 96 | 8 | 3407 |
| PSM | IQSQWKEFGL | 96 | 10 | 3408 |
| Kallikrein | IQSRIVGGW | 21 | 9 | 3409 |
| PSM | IVIARYGKV | 200 | 9 | 3410 |
| PSM | IVIARYGKVF | 200 | 10 | 3411 |
| PSM | IVLPFDCRDY | 591 | 10 | 3412 |
| PSM | IVLPFDCRDYA | 591 | 11 | 3413 |
| PSM | IVLRMMNDQL | 659 | 10 | 3414 |
| PSM | IVLRMMNDQLM | 659 | 11 | 3415 |
| PSM | IVPPFSAF | 157 | 8 | 3416 |
| PSM | IVRSFGTL | 398 | 8 | 3417 |
| PSM | KINCSGKI | 193 | 8 | 3418 |
| PSM | KINCSGKIV | 193 | 9 | 3419 |
| PSM | KINCSGKIVI | 193 | 10 | 3420 |
| PSM | KINCSGKIVIA | 193 | 11 | 3421 |
| Kallikrein | KITDVVKV | 131 | 8 | 3422 |
| Kallikrein | KITTVVKVL | 131 | 9 | 3423 |
| Kallikrein | KITDVVKVLGL | 131 | 11 | 3424 |
| PSM | KIVIARYGKV | 199 | 10 | 3425 |
| PSM | KIVIARYGKVF | 199 | 11 | 3426 |
| PSM | KLERDMKI | 187 | 8 | 3427 |
| PSM | KLGSGNDF | 514 | 8 | 3428 |
| PSM | KLGSGNDFEV | 514 | 10 | 3429 |
| PSM | KLGSGNDFEVF | 514 | 11 | 3430 |
| PSM | KLLEKMGGSA | 304 | 10 | 3431 |
| PSA | KLQCVDLHV | 166 | 9 | 3432 |
| PSA | KLQCVDLHVI | 166 | 10 | 3433 |
| PAP | KLRELSEL | 234 | 8 | 3434 |
| PAP | KLRELSELSL | 234 | 10 | 3435 |
| PAP | KLRELSELSLL | 234 | 11 | 3436 |
| PAP | KLSGLHGQDL | 193 | 10 | 3437 |
| PAP | KLSGLHGQDLF | 193 | 11 | 3438 |
| PSM | KMHIHSTNEV | 343 | 10 | 3439 |
| Kallikrein | KPAVYTKV | 239 | 8 | 3440 |
| Kallikrein | KPAVYTKVV | 239 | 9 | 3441 |
| Kallikrein | KPAVYTKVVHY | 239 | 11 | 3442 |
| PSM | KQIQSQWKEF | 94 | 10 | 3443 |
| PAP | KQKEKSRL | 251 | 8 | 3444 |
| PSM | KVDPSKAW | 71$ | 8 | 3445 |
| PSM | KVDPSKAWGEV | 718 | 11 | 3446 |
| PSM | KVFRGNKV | 207 | 8 | 3447 |
| PSM | KVFRGNKVKNA | 207 | 11 | 3448 |
| PSM | KVKNAQLA | 213 | 8 | 3449 |
| PSM | KVKNAQLAGA | 213 | 10 | 3450 |
| Kallikrein | KVLGLPTQEPA | 137 | 11 | 3451 |
| PSA | KVMDLPTQEPA | 133 | 11 | 3452 |
| PSM | KVPYNVGPGF | 324 | 10 | 3453 |
| Kallikrein | KVTEFMLCA | 191 | 9 | 3454 |
| Kallikrein | KVTEFMLCAGL | 191 | 11 | 3455 |
| PSA | KVTKFMLCA | 187 | 9 | 3456 |
| Kallikrein | KVVHYRKW | 245 | 8 | 3457 |
| PSA | KVVHYRKW | 241 | 8 | 3458 |
| Kallikrein | KVVHYRKWI | 245 | 9 | 3459 |
| PSA | KVVHYRKWI | 241 | 9 | 3460 |
| PAP | KVYDPLYCESV | 208 | 11 | 3461 |
| PSA | LILSRIVGGW | 16 | 10 | 3462 |
| PAP | LIMYSAHDTTV | 283 | 11 | 3463 |
| Kallikrein | LIQSRIVGGW | 20 | 10 | 3464 |
| PAP | LLARAASL | 7 | 8 | 3465 |
| PAP | LLARAASLSL | 7 | 10 | 3466 |
| PSM | LLEKMGGSA | 305 | 9 | 3467 |
| PAP | LLFFWLDRSV | 21 | 10 | 3468 |
| PAP | LLFFWLDRSVL | 21 | 11 | 3469 |
| PSM | LLGFLFGW | 34 | 8 | 3470 |
| PSM | LLGFLFGWF | 34 | 9 | 3471 |
| PSM | LLGFLFGWFI | 34 | 10 | 3472 |
| PSA | LLGRHSLF | 70 | 8 | 3473 |
| PSM | LLGSTEWA | 428 | 8 | 3474 |
| PSM | LLHETDSA | 4 | 8 | 3475 |
| PSM | LLHETDSAV | 4 | 9 | 3476 |
| PSM | LLHETDSAVA | 4 | 10 | 3477 |
| PAP | LLLARAASL | 6 | 9 | 3478 |
| PAP | LLLARAASLSL | 6 | 11 | 3479 |
| PAP | LLPPYASCHL | 306 | 10 | 3480 |
| PSM | LLQERGVA | 441 | 8 | 3481 |
| PSM | LLQERGVAY | 441 | 9 | 3482 |
| PSM | LLQERGVAYI | 441 | 10 | 3483 |
| Kallikrein | LLRLSEPA | 123 | 8 | 3484 |
| PSA | LLRLSEPA | 119 | 8 | 3485 |
| PSA | LLRLSEPAEL | 119 | 10 | 3486 |
| Kallikrein | LLRLSEPAKI | 123 | 10 | 3487 |
| Kallikrein | LLSNDMCA | 178 | 8 | 3488 |
| Kallikrein | LLSNDMCARA | 178 | 10 | 3489 |
| Kallikrein | LLSNDMCARAY | 178 | 11 | 3490 |
| PAP | LLWQPIPV | 136 | 8 | 3491 |
| PAP | LLWQPIPVHTV | 136 | 11 | 3492 |
| PSM | LMFLERAF | 668 | 8 | 3493 |
| PSM | LMFLERAFI | 668 | 9 | 3494 |
| Kallikrein | LMLLRLSEPA | 121 | 10 | 3495 |
| PSA | LMLLRLSEPA | 117 | 10 | 3496 |
| PAP | LMSAMTNL | 113 | 8 | 3497 |
| PAP | LMSAMTNLA | 113 | 9 | 3498 |
| PAP | LMSAMTNLAA | 113 | 10 | 3499 |
| PAP | LMSAMTNLAAL | 113 | 11 | 3500 |
| PSM | LMYSLVHNL | 469 | 9 | 3501 |
| PSM | LPDRPFYRHV | 681 | 10 | 3502 |
| PSM | LPDRPFYRHVI | 681 | 11 | 3503 |
| Kallikrein | LPEKPAVY | 236 | 8 | 3504 |
| Kallikrein | LPEKPAVYTKV | 236 | 11 | 3505 |
| PSA | LPERPSLY | 232 | 8 | 3506 |
| PSA | LPERPSLYTKV | 232 | 11 | 3507 |
| PSM | LPFDCRDY | 593 | 8 | 3508 |
| PSM | LPFDCRDYA | 593 | 9 | 3509 |
| PSM | LPFDCRDYAV | 593 | 10 | 3510 |
| PSM | LPFDCRDYAVV | 593 | 11 | 3511 |
| PAP | LPFRNCPRF | 156 | 9 | 3512 |
| PAP | LPGCSPSCPL | 344 | 10 | 3513 |
| PSM | LPGGGVQRGNI | 248 | 11 | 3514 |
| PAP | LPPYASCHL | 307 | 9 | 3515 |
| PSM | LPSIPVHPI | 289 | 9 | 3516 |
| PSM | LPSIPVHPIGY | 289 | 11 | 3517 |
| PAP | LPSWATEDTM | 223 | 10 | 3518 |
| Kallikrein | LPTQEPAL | 141 | 8 | 3519 |
| PSA | LPTQEPAL | 137 | 8 | 3520 |
| PSA | LQCVDLHV | 167 | 8 | 3521 |
| PSA | LQCVDLHVI | 167 | 9 | 3522 |
| Kallikrein | LQCVSLHL | 171 | 8 | 3523 |
| Kallikrein | LQCVSLHLL | 171 | 9 | 3524 |
| PSM | LQDFDKSNPI | 650 | 10 | 3525 |
| PSM | LQDFDKSNPIV | 650 | 11 | 3526 |
| PSM | LQERGVAY | 442 | 8 | 3527 |
| PSM | LQERGVAYI | 442 | 9 | 3528 |
| PSM | LQERGVAYINA | 442 | 11 | 3529 |
| PAP | LQGGVLVNEI | 258 | 10 | 3530 |
| PAP | LQGGVLVNEIL | 258 | 11 | 3531 |
| PAP | LQMALDVY | 296 | 8 | 3532 |
| PAP | LQMALDVYNGL | 296 | 11 | 3533 |
| PSA | LVASRGRA | 37 | 8 | 3534 |
| PSA | LVASRGRAV | 37 | 9 | 3535 |
| Kallikrein | LVCNGVLQGI | 217 | 10 | 3536 |
| PSA | LVCNGVLQGI | 213 | 10 | 3537 |
| PSM | LVEKFYDPM | 561 | 9 | 3538 |
| PSM | LVEKFYDPMF | 561 | 10 | 3539 |
| PAP | LVFRHGDRSPI | 40 | 11 | 3540 |
| PAP | LVGPVIPQDW | 359 | 10 | 3541 |
| PSM | LVHNLTKEL | 473 | 9 | 3542 |
| Kallikrein | LVHPQWVL | 54 | 8 | 3543 |
| PSA | LVHPQWVL | 50 | 8 | 3544 |
| Kallikrein | LVHPQWVLTA | 54 | 10 | 3545 |
| PSA | LVHPQWVLTA | 50 | 10 | 3546 |
| Kallikrein | LVHPQWVLTAA | 54 | 11 | 3547 |
| PSA | LVHPQWVLTAA | 50 | 11 | 3548 |
| PSM | LVLAGGFF | 26 | 8 | 3549 |
| PSM | LVLAGGFFL | 26 | 9 | 3550 |
| PSM | LVLAGGFFLL | 26 | 10 | 3551 |
| Kallikrein | LVLSIALSV | 4 | 9 | 3552 |
| PAP | LVNEILNHM | 263 | 9 | 3553 |
| Kallikrein | MLLRLSEPA | 122 | 9 | 3554 |
| PSA | MLLRLSEPA | 118 | 9 | 3555 |
| PSA | MLLRLSEPAEL | 118 | 11 | 3556 |
| Kallikrein | MLLRLSEPAKI | 122 | 11 | 3557 |
| PAP | MLPGCSPSCPL | 343 | 11 | 3558 |
| PSM | MMNDQLMF | 663 | 8 | 3559 |
| PSM | MMNDQLMFL | 663 | 9 | 3560 |
| PSM | MPEGDLVY | 169 | 8 | 3561 |
| PSM | MPEGDLVYV | 169 | 9 | 3562 |
| PSM | MPEGDLVYVNY | 169 | 11 | 3563 |
| PSM | MVFELANSI | 583 | 9 | 3564 |
| PSM | MVFELANSIV | 583 | 10 | 3565 |
| PSM | MVFELANSIVL | 583 | 11 | 3566 |
| PSM | NIKKFLYNF | 69 | 9 | 3567 |
| PSM | NILNLNGA | 257 | 8 | 3568 |
| PSM | NITPKHNM | 51 | 8 | 3569 |
| PSM | NITPKHNMKA | 51 | 10 | 3570 |
| PSM | NITPKHNMKAF | 51 | 11 | 3571 |
| PAP | NLAALFPPEGV | 119 | 11 | 3572 |
| PSM | NLLHETDSA | 3 | 9 | 3573 |
| PSM | NLLHETDSAV | 3 | 10 | 3574 |
| PSM | NLLHETDSAVA | 3 | 11 | 3575 |
| PSM | NLNGAGDPL | 260 | 9 | 3576 |
| PSM | NMKAFLDEL | 57 | 9 | 3577 |
| PSM | NMKAFLDELKA | 57 | 11 | 3578 |
| Kallikrein | NMSLLKHQSL | 102 | 10 | 3579 |
| PAP | NPILLWQPI | 133 | 9 | 3580 |
| PAP | NPILLWQPIPV | 133 | 11 | 3581 |
| PSM | NPIVLRMM | 657 | 8 | 3582 |
| PSM | NVGPGFTGNF | 328 | 10 | 3583 |
| PSM | NVIGTLRGA | 357 | 9 | 3584 |
| PSM | NVIGTLRGAV | 357 | 10 | 3585 |
| PSM | NVSDIVPPF | 153 | 9 | 3586 |
| PSM | NVSDIVPPFSA | 153 | 11 | 3587 |
| PAP | PIDTFPTDPI | 49 | 10 | 3588 |
| PSM | PIGYYDAQKL | 296 | 10 | 3589 |
| PSM | PIGYYDAQKLL | 296 | 11 | 3590 |
| PAP | PIKESSWPQGF | 57 | 11 | 3591 |
| PAP | PILLWQPI | 134 | 8 | 3592 |
| PAP | PILLWQPIPV | 134 | 10 | 3593 |
| PAP | PIPVHTVPL | 140 | 9 | 3594 |
| PSM | PIVLRMMNDQL | 658 | 11 | 3595 |
| PAP | PLERFAEL | 352 | 8 | 3596 |
| PAP | PLERFAELV | 352 | 9 | 3597 |
| PSM | PLGLPDRPF | 678 | 9 | 3598 |
| PSM | PLGLPDRPFY | 678 | 10 | 3599 |
| PSA | PLILSRIV | 15 | 8 | 3600 |
| PSA | PLILSRIVGGW | 15 | 11 | 3601 |
| Kallikrein | PLIQSRIV | 19 | 8 | 3602 |
| Kallikrein | PLIQSRIVGGW | 19 | 11 | 3603 |
| PAP | PLLLARAA | 5 | 8 | 3604 |
| PAP | PLLLARAASL | 5 | 10 | 3605 |
| PSM | PLMYSLVHNL | 468 | 10 | 3606 |
| PAP | PLSEDQLL | 147 | 8 | 3607 |
| PAP | PLSEDQLLY | 147 | 9 | 3608 |
| PAP | PLSEDQLLYL | 147 | 10 | 3609 |
| PSM | PLTPGYPA | 267 | 8 | 3610 |
| PSM | PLTPGYPANEY | 267 | 11 | 3611 |
| Kallikrein | PLVCNGVL | 216 | 8 | 3612 |
| PSA | PLVCNGVL | 212 | 8 | 3613 |
| Kallikrein | PLVCNGVLQGI | 216 | 11 | 3614 |
| PSA | PLVGNGVLQGI | 212 | 11 | 3615 |
| PAP | PLYCESVHNF | 212 | 10 | 3616 |
| PSA | PLYDMSLL | 95 | 8 | 3617 |
| PSM | PLYHSVYETY | 550 | 10 | 3618 |
| Kallikrein | PLYNMSLL | 99 | 8 | 3619 |
| PSM | PMFKYHLTV | 568 | 9 | 3620 |
| PSM | PMFKYHLTVA | 568 | 10 | 3621 |
| PSM | PPDSSWRGSL | 314 | 10 | 3622 |
| PAP | PPEGVSIW | 125 | 8 | 3623 |
| PAP | PPEGVSIWNPI | 125 | 11 | 3624 |
| PSM | PPFSAFSPQGM | 159 | 11 | 3625 |
| PSM | PPGYENVSDI | 148 | 10 | 3626 |
| PSM | PPGYENVSDIV | 148 | 11 | 3627 |
| PSM | PPPGYENV | 147 | 8 | 3628 |
| PSM | PPPGYENVSDI | 147 | 11 | 3629 |
| PSM | PPPPGYENV | 146 | 9 | 3630 |
| PAP | PPYASCHL | 308 | 8 | 3631 |
| PAP | PPYASCHLTEL | 308 | 11 | 3632 |
| PAP | PQDWSTECM | 365 | 9 | 3633 |
| PSM | PQEMKTYSV | 619 | 9 | 3634 |
| PSM | PQEMKTYSVSF | 619 | 11 | 3635 |
| PAP | PQGFGQLTQL | 64 | 10 | 3636 |
| PSM | PQGMPEGDL | 166 | 9 | 3637 |
| PSM | PQGMPEGDLV | 166 | 10 | 3638 |
| PSM | PQGMPEGDLVY | 166 | 11 | 3639 |
| PSA | PQKVTKFM | 185 | 8 | 3640 |
| PSA | PQKVTKFML | 185 | 9 | 364I |
| PSA | PQKVTKFMLCA | 185 | 11 | 3642 |
| PSM | PQSGAAVV | 388 | 8 | 3643 |
| PSM | PQSGAAVVHEI | 388 | 11 | 3644 |
| Kallikrein | PQWVLTAA | 57 | 8 | 3645 |
| PSA | PQWVLTAA | 53 | 8 | 3646 |
| PSA | PQWVLTAAHCI | 53 | 11 | 3647 |
| Kallikrein | PQWVLTAAHCL | 57 | 11 | 3648 |
| PSM | PVHPIGYY | 293 | 8 | 3649 |
| PSM | PVHPIGYYDA | 293 | 10 | 3650 |
| Kallikrein | PVSHSFPHPL | 91 | 10 | 3651 |
| Kallikrein | PVSHSFPHPLY | 91 | 11 | 3652 |
| PAP | QIPSYKKL | 276 | 8 | 3653 |
| PAP | QIPSYKKLI | 276 | 9 | 3654 |
| PAP | QIPSYKKLIM | 276 | 10 | 3655 |
| PAP | QIPSYKKLIMY | 276 | 11 | 3656 |
| PSM | QIQSQWKEF | 95 | 9 | 3657 |
| PSM | QIQSQWKEFGL | 95 | 11 | 3658 |
| PSM | QIYVAAFTV | 731 | 9 | 3659 |
| PSM | QIYVAAFTVQA | 731 | 11 | 3660 |
| PSM | QLAGAKGV | 218 | 8 | 3661 |
| PSM | QLAGAKGVI | 218 | 9 | 3662 |
| PSM | QLAGAKGVIL | 218 | 10 | 3663 |
| PSM | QLAGAKGVILY | 218 | 11 | 3664 |
| PSM | QLAKQIQSQW | 91 | 10 | 3665 |
| PAP | QLGMEQHY | 72 | 8 | 3666 |
| PAP | QLGMEQHYEL | 72 | 10 | 3667 |
| PSM | QLMFLERA | 667 | 8 | 3668 |
| PSM | QLMFLERAF | 667 | 9 | 3669 |
| PSM | QLMFLERAFI | 667 | 10 | 3670 |
| PAP | QLTQLGMEQHY | 69 | 11 | 3671 |
| PAP | QMALDVYNGL | 297 | 10 | 3672 |
| PAP | QMALDVYNGLL | 297 | 11 | 3673 |
| PAP | QPIPVHTV | 139 | 8 | 3674 |
| PAP | QPIPVHTVPL | 139 | 10 | 3675 |
| Kallikrein | QPWQVAVY | 36 | 8 | 3676 |
| PSA | QPWQVLVA | 32 | 8 | 3677 |
| Kallikrein | QVAVYSHGW | 39 | 9 | 3678 |
| Kallikrein | QVAVYSHGWA | 39 | 10 | 3679 |
| PSA | QVFQVSHSF | 84 | 9 | 3680 |
| PSA | QVHPQKVTKF | 182 | 10 | 3681 |
| PSA | QVHPQKVTKFM | 182 | 11 | 3682 |
| PSA | QVLVASRGRA | 35 | 10 | 3683 |
| PSA | QVLVASRGRAV | 35 | 11 | 3684 |
| PSM | QVRGGMVF | 578 | 8 | 3685 |
| PSM | QVRGGMVFEL | 578 | 10 | 3686 |
| PSM | QVRGGMVFELA | 578 | 11 | 3687 |
| PSA | QVSHSFPHPL | 87 | 10 | 3688 |
| PSA | QVSHSFPHPLY | 87 | 11 | 3689 |
| Kallikrein | QVWLGRHNL | 72 | 9 | 3690 |
| Kallikrein | QVWLGRHNLF | 72 | 10 | 3691 |
| PAP | QVYIRSTDV | 101 | 9 | 3692 |
| PSM | RISKLGSGNDF | 511 | 11 | 3693 |
| PSM | RIYNVIGTL | 354 | 9 | 3694 |
| PSM | RLGIASGRA | 527 | 9 | 3695 |
| PSM | RLGIASGRARY | 527 | 11 | 3696 |
| PAP | RLHPYKDF | 180 | 8 | 3697 |
| PAP | RLHPYKDFI | 180 | 9 | 3698 |
| PAP | RLHPYKDFIA | 180 | 10 | 3699 |
| PSM | RLLQERGV | 440 | 8 | 3700 |
| PSM | RLLQERGVA | 440 | 9 | 3701 |
| PSM | RLLQERGVAY | 440 | 10 | 3702 |
| PSM | RLLQERGVAYI | 440 | 11 | 3703 |
| PSM | RLQDFDKSNPI | 649 | 11 | 3704 |
| PAP | RLQGGVLV | 257 | 8 | 3705 |
| PAP | RLQGGVLVNEI | 257 | 11 | 3706 |
| PSA | RLSEPAEL | 121 | 8 | 3707 |
| PSA | RLSEPAELTDA | 121 | 11 | 3708 |
| Kallikrein | RLSEPAKI | 125 | 8 | 3709 |
| Kallikrein | RLSEPAKITDV | 125 | 11 | 3710 |
| PSM | RMMNDQLM | 662 | 8 | 3711 |
| PSM | RMMNDQLMF | 662 | 9 | 3712 |
| PSM | RMMNDQLMFL | 662 | 10 | 3713 |
| Kallikrein | RPDEDSSHDL | 112 | 10 | 3714 |
| Kallikrein | RPDEDSSHDLM | 112 | 11 | 3715 |
| PSM | RPFYRHVI | 684 | 8 | 3716 |
| PSM | RPFYRHVIY | 684 | 9 | 3717 |
| PSM | RPFYRHVIYA | 684 | 10 | 3718 |
| PSA | RPGDDSSHDL | 108 | 10 | 3719 |
| PSA | RPGDDSSHDLM | 108 | 11 | 3720 |
| PSM | RPRRTILF | 411 | 8 | 3721 |
| PSM | RPRRTILFA | 411 | 9 | 3722 |
| PSM | RPRRTILFASW | 411 | 11 | 3723 |
| Kallikrein | RPRSLQCV | 167 | 8 | 3724 |
| Kallikrein | RPRSLQCVSL | 167 | 10 | 3725 |
| PSM | RPRWLCAGA | 17 | 9 | 3726 |
| PSM | RPRWLCAGAL | 17 | 10 | 3727 |
| PSM | RPRWLCAGALV | 17 | 11 | 3728 |
| PSA | RPSLYTKV | 235 | 8 | 3729 |
| PSA | RPSLYTKVV | 235 | 9 | 3730 |
| PSA | RPSLYTKVVHY | 235 | 11 | 3731 |
| PSM | RQIYVAAF | 730 | 8 | 3732 |
| PSM | RQIYVAAFTV | 730 | 10 | 3733 |
| PSM | RVDCTPLM | 463 | 8 | 3734 |
| PSM | RVDCTPLMY | 463 | 9 | 3735 |
| PSM | RVDCTPLMYSL | 463 | 11 | 3736 |
| Kallikrein | RVPVSHSF | 89 | 8 | 3737 |
| Kallikrein | SIALSVGCTGA | 7 | 11 | 3738 |
| PSM | SIEGNYTL | 455 | 8 | 3739 |
| PSM | SIEGNYTLRV | 455 | 10 | 3740 |
| Kallikrein | SIEPEEFL | 159 | 8 | 3741 |
| PSA | SIEPEEFL | 155 | 8 | 3742 |
| PSM | SIINEDGNEI | 129 | 10 | 3743 |
| PSM | SIINEDGNEIF | 129 | 11 | 3744 |
| PSM | SIPVHPIGY | 291 | 9 | 3745 |
| PSM | SIPVHPIGYY | 291 | 10 | 3746 |
| PSM | SISMKHPQEM | 613 | 10 | 3747 |
| PSM | SIVLPFDCRDY | 590 | 11 | 3748 |
| PAP | SIWNPILL | 130 | 8 | 3749 |
| PAP | SIWNPILLW | 130 | 9 | 3750 |
| PSM | SLFEPPPPGY | 142 | 10 | 3751 |
| PSA | SLFHPEDTGQV | 75 | 11 | 3752 |
| PSM | SLFSAVKNF | 631 | 9 | 3753 |
| PAP | SLGFLFLL | 15 | 8 | 3754 |
| PAP | SLGFLFLLF | 15 | 9 | 3755 |
| PAP | SLGFLFLLFF | 15 | 10 | 3756 |
| PAP | SLGFLFLLFFW | 15 | 11 | 3757 |
| Kallikrein | SLHLLSNDM | 175 | 9 | 3758 |
| Kallikrein | SLHLLSNDMCA | 175 | 11 | 3759 |
| PSM | SLKVPYNV | 322 | 8 | 3760 |
| Kallikrein | SLLKHQSL | 104 | 8 | 3761 |
| PSA | SLLKNRFL | 100 | 8 | 3762 |
| PAP | SLLSLYGI | 242 | 8 | 3763 |
| Kallikrein | SLQCVSLHL | 170 | 9 | 3764 |
| Kallikrein | SLQCVSLHLL | 170 | 10 | 3765 |
| PAP | SLSLGFLF | 13 | 8 | 3766 |
| PAP | SUSLGFLFL | 13 | 9 | 3767 |
| PAP | SLSLGFLFLL | 13 | 10 | 3768 |
| PAP | SLSLGFLFLLF | 13 | 11 | 3769 |
| PSM | SLVHNLTKEL | 472 | 10 | 3770 |
| PSA | SLYTKVVHY | 237 | 9 | 3771 |
| PSM | SMKHPQEM | 615 | 8 | 3772 |
| PSM | SMKHPQEMKTY | 615 | 11 | 3773 |
| PSM | SPDEGFEGKSL | 483 | 11 | 3774 |
| PSM | SPEFSGMPRI | 503 | 10 | 3775 |
| PAP | SPIDTFPTDPI | 48 | 11 | 3776 |
| PSM | SPQGMPEGDL | 165 | 10 | 3777 |
| PSM | SPQGMPEGDLV | 165 | 11 | 3778 |
| PAP | SPSCPLERF | 348 | 9 | 3779 |
| PAP | SPSCPLERFA | 348 | 10 | 3780 |
| PSM | SPSPEFSGM | 501 | 9 | 3781 |
| Kallikrein | SQPWQVAV | 35 | 8 | 3782 |
| Kallikrein | SQPWQVAVY | 35 | 9 | 3783 |
| PSA | SQPWQVLV | 31 | 8 | 3784 |
| PSA | SQPWQVLVA | 31 | 9 | 3785 |
| Kallikrein | SQVWLGRHNL | 71 | 10 | 3786 |
| Kallikrein | SQVWLGRHNLF | 71 | 11 | 3787 |
| PSM | SQWKEFGL | 98 | 8 | 3788 |
| PSM | SQWKEFGLDSV | 98 | 11 | 3789 |
| PSM | SVELAHYDV | 107 | 9 | 3790 |
| PSM | SVELAHYDVL | 107 | 10 | 3791 |
| PSM | SVELAHYDVLL | 107 | 11 | 3792 |
| Kallikrein | SVGCTGAV | 11 | 8 | 3793 |
| Kallikrein | SVGCTGAVPL | 11 | 10 | 3794 |
| Kallikrein | SVGCTGAVPLI | 11 | 11 | 3795 |
| PAP | SVHNFTLPSW | 217 | 10 | 3796 |
| PAP | SVHNFTLPSWA | 217 | 11 | 3797 |
| PSA | SVILLGRHSL | 67 | 10 | 3798 |
| PSA | SVILLGRHSLF | 67 | 11 | 3799 |
| PAP | SVLAKELKF | 29 | 9 | 3800 |
| PAP | SVLAKELKFV | 29 | 10 | 3801 |
| PSM | SVSFDSLF | 626 | 8 | 3802 |
| PSM | SVSFDSLFSA | 626 | 10 | 3803 |
| PSM | SVSFDSLFSAV | 626 | 11 | 3804 |
| PSA | SVTWIGAA | 7 | 8 | 3805 |
| PSA | SVTWIGAAPL | 7 | 10 | 3806 |
| PSA | SVTWIGAAPLI | 7 | 11 | 3807 |
| PSM | SVYETYEL | 554 | 8 | 3808 |
| PSM | SVYETYELV | 554 | 9 | 3809 |
| PSM | TILFASWDA | 415 | 9 | 3810 |
| PAP | TLGKLSGL | 190 | 8 | 3811 |
| PAP | TLKSEEFQKRL | 171 | 11 | 3812 |
| PAP | TLMSAMTNL | 112 | 9 | 3813 |
| PAP | TLMSAMTNLA | 112 | 10 | 3814 |
| PAP | TLMSAMTNLAA | 112 | 11 | 3815 |
| PAP | TLPSWATEDTM | 222 | 11 | 3816 |
| PSM | TLRGAVEPDRY | 361 | 11 | 3817 |
| PSM | TLRVDCTPL | 461 | 9 | 3818 |
| PSM | TLRVDCTPLM | 461 | 10 | 3819 |
| PSM | TLRVDCTPLMY | 461 | 11 | 3820 |
| PSA | TLSVTWIGA | 5 | 9 | 3821 |
| PSA | TLSVTWIGAA | 5 | 10 | 3822 |
| PAP | TMTKLREL | 231 | 8 | 3823 |
| PAP | TMTKLRELSEL | 231 | 11 | 3824 |
| PSM | TPGYPANEY | 269 | 9 | 3825 |
| PSM | TPGYPANEYA | 269 | 10 | 3826 |
| PSM | TPGYPANEYAY | 269 | 11 | 3827 |
| PSM | TPKHNMKA | 53 | 8 | 3828 |
| PSM | TPKHNMKAF | 53 | 9 | 3829 |
| PSM | TPKHNMKAFL | 53 | 10 | 3830 |
| PSA | TPKKLQCV | 163 | 8 | 3831 |
| PSA | TPKKLQCVDL | 163 | 10 | 3832 |
| PSM | TPLMYSLV | 467 | 8 | 3833 |
| PSM | TPLMYSLVHNL | 467 | 11 | 3834 |
| Kallikrein | TQEPALGTTCY | 143 | 11 | 3835 |
| PSA | TQEPALGTTCY | 139 | 11 | 3836 |
| PAP | TQHEPYPL | 335 | 8 | 3837 |
| PAP | TQHEPYPLM | 335 | 9 | 3838 |
| PAP | TQHEPYPLML | 335 | 10 | 3839 |
| PAP | TQIPSYKKL | 275 | 9 | 3840 |
| PAP | TQIPSYKKLI | 275 | 10 | 3841 |
| PAP | TQIPSYKKLIM | 275 | 11 | 3842 |
| PSM | TQKVKMHI | 339 | 8 | 3843 |
| PAP | TQLGMEQHY | 71 | 9 | 3844 |
| PAP | TQLGMEQHYEL | 71 | 11 | 3845 |
| PSM | TVAQVRGGM | 575 | 9 | 3846 |
| PSM | TVAQVRGGMV | 575 | 10 | 3847 |
| PSM | TVAQVRGGMVF | 575 | 11 | 3848 |
| PAP | TVPLSEDQL | 145 | 9 | 3849 |
| PAP | TVPLSEDQLL | 145 | 10 | 3850 |
| PAP | TVPLSEDQLLY | 145 | 11 | 3851 |
| PSM | TVQAAAETL | 738 | 9 | 3852 |
| PAP | TVSGLQMA | 292 | 8 | 3853 |
| PAP | TVSGLQMAL | 292 | 9 | 3854 |
| PAP | TVSGLQMALDV | 292 | 11 | 3855 |
| PSM | VIARYGKV | 201 | 8 | 3856 |
| PSM | VIARYGKVF | 201 | 9 | 3857 |
| PSM | VIGTLRGA | 358 | 8 | 3858 |
| PSM | VIGTLRGAV | 358 | 9 | 3859 |
| PSM | VILGGHRDSW | 372 | 10 | 3860 |
| PSM | VILGGHRDSWV | 372 | 11 | 3861 |
| PSA | VILLGRHSL | 68 | 9 | 3862 |
| PSA | VILLGRHSLF | 68 | 10 | 3863 |
| PSM | VILYSDPA | 225 | 8 | 3864 |
| PSM | VILYSDPADY | 225 | 10 | 3865 |
| PSM | VILYSDPADYF | 225 | 11 | 3866 |
| PAP | VIPQDWSTECM | 363 | 11 | 3867 |
| PSA | VISNDVCA | 174 | 8 | 3868 |
| PSA | VISNDVCAQV | 174 | 10 | 3869 |
| PSM | VIYAPSSHNKY | 690 | 11 | 3870 |
| PSM | VLAGGFFL | 27 | 8 | 3871 |
| PSM | VLAGGFFLL | 27 | 9 | 3872 |
| PSM | VLAGGFFLLGF | 27 | 11 | 3873 |
| PAP | VLAKELKF | 30 | 8 | 3874 |
| PAP | VLAKELKFV | 30 | 9 | 3875 |
| PAP | VLAKELKFVTL | 30 | 11 | 3876 |
| Kallikrein | VLGLPTQEPA | 138 | 10 | 3877 |
| Kallikrein | VLGLPTQEPAL | 138 | 11 | 3878 |
| PSM | VLPFDCRDY | 592 | 9 | 3879 |
| PSM | VLPFDGRDYA | 592 | 10 | 3880 |
| PSM | VLPFDCRDYAV | 592 | 11 | 3881 |
| Kallikrein | VLQGITSW | 222 | 8 | 3882 |
| PSA | VLQGITSW | 218 | 8 | 3883 |
| PSM | VLRKYADKI | 603 | 9 | 3884 |
| PSM | VLRKYADKIY | 603 | 10 | 3885 |
| PSM | VLRMMNDQL | 660 | 9 | 3886 |
| PSM | VLRMMNDQLM | 660 | 10 | 3887 |
| PSM | VLRMMNDQLMF | 660 | 11 | 3888 |
| Kallikrein | VLSIALSV | 5 | 8 | 3889 |
| PSA | VLTAAHCI | 56 | 8 | 3890 |
| Kallikrein | VLTAAHCL | 60 | 8 | 3891 |
| PSA | VLVASRGRA | 36 | 9 | 3892 |
| PSA | VLVASRGRAV | 36 | 10 | 3893 |
| Kallikrein | VLVHPQWV | 53 | 8 | 3894 |
| PSA | VLVHPQWV | 49 | 8 | 3895 |
| Kallikrein | VLVHPQWVL | 53 | 9 | 3896 |
| PSA | VLVHPQWVL | 49 | 9 | 3897 |
| Kallikrein | VLVHPQWVLTA | 53 | 11 | 3898 |
| PSA | VLVHPQWVLTA | 49 | 11 | 3899 |
| PAP | VLVNEILNHM | 262 | 10 | 3900 |
| PSA | VMDLPTQEPA | 134 | 10 | 3901 |
| PSA | VMDLPTQEPAL | 134 | 11 | 3902 |
| Kallikrein | VPLIQSRI | 18 | 8 | 3903 |
| Kallikrein | VPLIQSRIV | 18 | 9 | 3904 |
| PAP | VPLSEDQL | 146 | 8 | 3905 |
| PAP | VPLSEDQLL | 146 | 9 | 3906 |
| PAP | VPLSEDQLLY | 146 | 10 | 3907 |
| PAP | VPLSEDQLLYL | 146 | 11 | 3908 |
| Kallikrein | VPVSHSFPHPL | 90 | 11 | 3909 |
| PSM | VPYNVGPGF | 325 | 9 | 3910 |
| PSM | VQAAAETL | 739 | 8 | 3911 |
| PSM | VQAAAETLSEV | 739 | 11 | 3912 |
| PSM | VQRGNILNL | 253 | 9 | 3913 |
| PSA | VVFLTLSV | 1 | 8 | 3914 |
| PSA | VVFLTLSVTW | 1 | 10 | 3915 |
| PSA | VVFLTLSVTWI | 1 | 11 | 3916 |
| PSM | VVHEIVRSF | 394 | 9 | 3917 |
| Kallikrein | VVHYRKWI | 246 | 8 | 3918 |
| PSA | VVHYRKWI | 242 | 8 | 3919 |
| PSM | VVLRKYADKI | 602 | 10 | 3920 |
| PSM | VVLRKYADKIY | 602 | 11 | 3921 |
| PSA | WIGAAPLI | 10 | 8 | 3922 |
| PSA | WIGAAPLIL | 10 | 9 | 3923 |
| Kallikrein | WIKDTIAA | 252 | 8 | 3924 |
| PSA | WIKDTIVA | 248 | 8 | 3925 |
| PSM | WLCAGALV | 20 | 8 | 3926 |
| PSM | WLGAGALVL | 20 | 9 | 3927 |
| PSM | WLCAGALVLA | 20 | 10 | 3928 |
| PAP | WLDRSVLA | 25 | 8 | 3929 |
| PAP | WLDRSVLAKEL | 25 | 11 | 3930 |
| Kallikrein | WLGRHNLF | 74 | 8 | 3931 |
| PAP | WPQGFGQL | 63 | 8 | 3932 |
| PAP | WPQGFGQLTQL | 63 | 11 | 3933 |
| PAP | WQPIPVHTV | 138 | 9 | 3934 |
| PAP | WQPIPVHTVPL | 138 | 11 | 3935 |
| Kallikrein | WQVAVYSHGW | 38 | 10 | 3936 |
| Kallikrein | WQVAVYSHGWA | 38 | 11 | 3937 |
| PSA | WQVLVASRGRA | 34 | 11 | 3938 |
| PSA | WVLTAAHCI | 55 | 9 | 3939 |
| Kallikrein | WVLTAAHCL | 59 | 9 | 3940 |
| PSM | YINADSSI | 449 | 8 | 3941 |
| PAP | YIRKRYRKF | 84 | 9 | 3942 |
| PAP | YIRKRYRKFL | 84 | 10 | 3943 |
| PAP | YIRSTDVDRTL | 103 | 11 | 3944 |
| PAP | YLPFRNCPRF | 155 | 10 | 3945 |
| PSM | YPANEYAY | 272 | 8 | 3946 |
| PSM | YPLYHSVY | 549 | 8 | 3947 |
| PSM | YPLYHSVYETY | 549 | 11 | 3948 |
| PSM | YPNKTHPNY | 119 | 9 | 3949 |
| PSM | YPNKTHPNYI | 119 | 10 | 3950 |
| PSM | YVAAFTVQA | 733 | 9 | 3951 |
| PSM | YVAAFTVQAA | 733 | 10 | 3952 |
| PSM | YVAAFTVQAAA | 733 | 11 | 3953 |
| PSM | YVILGGHRDSW | 371 | 11 | 3954 |
| PSM | YVNYARTEDF | 176 | 10 | 3955 |
| PSM | YVNYARTEDFF | 176 | 11 | 3956 |

[0448] TABLE XV
Prostate A01 Motif Peptides with Binding Data

| | | | | | |
|---|---|---|---|---|---|
| | | | No. of | | Seq. |
| | | | Amino | | Id |
| Protein | Sequence | Position | Acids | A*0101 | No. |

| | | | | | |
|---|---|---|---|---|---|
| PSM | ADSSIEGNY | 452 | 9 | | 3957 |
| PSM | AGAKGVILY | 220 | 9 | | 3958 |
| PSM | AGDPLTPGY | 264 | 9 | 0.0099 | 3959 |
| PSM | AGESFPGIY | 701 | 9 | 0.0040 | 3960 |
| PSM | APSSHNKY | 693 | 8 | | 3961 |
| PAP | ASCHLTELY | 311 | 9 | 0.7700 | 3962 |
| PSM | CRDYAVVLRKY | 597 | 11 | | 3963 |
| PSM | CSGKIVIARY | 196 | 10 | 0.0160 | 3964 |
| PSM | DSSIEGNY | 453 | 8 | | 3965 |
| PSM | DSVELAHY | 106 | 8 | | 3966 |
| PSM | DYAVVLRKY | 599 | 9 | | 3967 |
| PSM | EGDLVYVNY | 171 | 9 | 0.0024 | 3968 |
| PSM | ELAHYDVLLSY | 109 | 11 | | 3969 |
| PAP | ELSELSLLSLY | 237 | 11 | | 3970 |
| PAP | ELSLLSLY | 240 | 8 | | 3971 |
| Kallikrein | EPALGTTCY | 145 | 9 | 0.0011 | 3972 |
| PSA | EPALGTTCY | 141 | 9 | 0.0011 | 3973 |
| PAP | ESYKHEQVY | 95 | 9 | 0.0980 | 3974 |
| PSM | ETNKFSGY | 542 | 8 | | 3975 |
| PSM | ETNKFSGYPLY | 542 | 11 | | 3976 |
| PSM | ETYELVEKFY | 557 | 10 | 0.0260 | 3977 |
| PSM | FSGYPLYHSVY | 546 | 11 | | 3978 |
| PSM | FYDPMFKY | 565 | 8 | | 3979 |
| PSM | GESFPGIY | 702 | 8 | | 3980 |
| PSM | GFEGKSLY | 487 | 8 | | 3981 |
| PSM | GIASGRARY | 529 | 9 | 0.0025 | 3982 |
| PSM | GLDSVELAHY | 104 | 10 | 0.4800 | 3983 |
| PAP | GMEQHYELGEY | 74 | 11 | | 3984 |
| PSM | GMPEGDLVY | 168 | 9 | 0.0001 | 3985 |
| PAP | HMKRATQIPSY | 270 | 11 | | 3986 |
| Kallikrein | HSFPHPLY | 94 | 8 | 0.0260 | 3987 |
| PSA | HSFPHPLY | 90 | 8 | 0.0260 | 3988 |
| Kallikrein | HSQPWQVAVY | 34 | 10 | | 3989 |
| PSM | HSTNEVTRIY | 347 | 10 | 0.0048 | 3990 |
| PSM | HYDVLLSY | 112 | 8 | | 3991 |
| PSM | IASGRARY | 530 | 8 | | 3992 |
| PSM | IHSTNEVTRIY | 346 | 11 | | 3993 |
| PSM | INADSSIEGNY | 450 | 11 | | 3994 |
| PAP | IPSYKKLIMY | 277 | 10 | 0.5700 | 3995 |
| PAP | IWSKVYDPLY | 205 | 10 | 0.0012 | 3996 |
| PSM | IYAPSSHNKY | 691 | 10 | | 3997 |
| PSM | KAENIKKFLY | 66 | 10 | 0.0001 | 3998 |
| PSM | KFSGYPLY | 545 | 8 | | 3999 |
| PAP | KGEYFVEMY | 322 | 9 | 3.4000 | 4000 |
| PAP | KGEYFVEMYY | 322 | 10 | 0.0180 | 4001 |
| Kallikrein | KHSQPWQVAVY | 33 | 11 | | 4002 |
| Kallikrein | KPAVYTKVVHY | 239 | 11 | | 4003 |
| PAP | KRATQIPSY | 272 | 9 | 0.0011 | 4004 |
| PSM | KYAGESFPGIY | 699 | 11 | | 4005 |
| PSM | LDSVELAHY | 105 | 9 | | 4006 |
| PSM | LFEPPPPGY | 143 | 9 | 0.0010 | 4007 |
| PAP | LGEYIRKRY | 81 | 9 | 0.7800 | 4008 |
| PSM | LKAENIKKFLY | 65 | 11 | | 4009 |
| Kallikrein | LLSNDMCARAY | 178 | 11 | | 4010 |
| PAP | LNESYKHEQVY | 93 | 11 | | 4011 |
| Kallikrein | LPEKPAVY | 236 | 8 | | 4012 |
| PSA | LPERPSLY | 232 | 8 | 0.0002 | 4013 |
| PSM | LPSIPVHPIGY | 289 | 11 | | 4014 |
| PSM | LQERGVAY | 442 | 8 | | 4015 |
| PAP | LSEDQLLY | 148 | 8 | | 4016 |
| PAP | LSELSLLSLY | 238 | 10 | 12.0000 | 4017 |
| Kallikrein | LSNDMCARAY | 179 | 10 | | 4018 |
| PSM | LSYPNKTHPNY | 117 | 11 | | 4019 |
| PAP | LTELYFEKGEY | 315 | 11 | | 4020 |
| PSM | LTPGYPANEY | 268 | 10 | 0.0082 | 4021 |
| PAP | LTQLGMEQHY | 70 | 10 | 0.6200 | 4022 |
| PSM | LYSDPADY | 227 | 8 | | 4023 |
| PSM | MPEGDLVY | 169 | 8 | | 4024 |
| PSM | MPEGDLVYVNY | 169 | 11 | | 4025 |
| PSM | NADSSIEGNY | 451 | 10 | 0.4300 | 4026 |
| PSM | NCSGKIVIARY | 195 | 11 | | 4027 |
| PAP | NESYKHEQVY | 94 | 10 | 0.0033 | 4028 |
| PSM | NGAGDPLTPGY | 262 | 11 | | 4029 |
| PSM | NWETNKFSGY | 540 | 10 | | 4030 |
| Kallikrein | PCALPEKPAVY | 233 | 11 | | 4031 |
| PSA | PCALPERPSLY | 229 | 11 | | 4032 |
| PSM | PDEGFEGKSLY | 484 | 11 | | 4033 |
| PAP | PLSEDQLLY | 147 | 9 | 1.2000 | 4034 |
| PSM | PSIPVHPIGY | 290 | 10 | | 4035 |
| PSM | PSIPVHPIGYY | 290 | 11 | | 4036 |
| PSA | PSLYTKVVHY | 236 | 10 | 0.0010 | 4037 |
| PAP | PSYKKLIMY | 278 | 9 | 0.0031 | 4038 |
| Kallikrein | PVSHSFPHPLY | 91 | 11 | | 4039 |
| PAP | PYASCHLTELY | 309 | 11 | | 4040 |
| PSM | QLAGAKGVILY | 218 | 11 | | 4041 |
| PSA | QVSHSFPHPLY | 87 | 11 | | 4042 |
| PSM | RGAVEPDRY | 363 | 9 | 0.0001 | 4043 |
| PSM | RGSLKVPY | 320 | 8 | | 4044 |
| PAP | RNETQHEPY | 332 | 9 | 0.0002 | 4045 |
| PSA | RPSLYTKVVHY | 235 | 11 | | 4046 |
| PSM | RVDCTPLMY | 463 | 9 | 11.0000 | 4047 |
| PAP | SEEFQKRLHPY | 174 | 11 | | 4048 |
| Kallikrein | SHSFPHPLY | 93 | 9 | 0.0011 | 4049 |
| PSA | SHSFPHPLY | 89 | 9 | 0.0011 | 4050 |
| PSM | SMKHPQEMKTY | 615 | 11 | | 4051 |
| Kallikrein | SNDMCARAY | 180 | 9 | | 4052 |
| PSM | SSWRGSLKVPY | 317 | 11 | | 4053 |
| PSM | STNEVTRIY | 348 | 9 | 0.0430 | 4054 |
| PSM | TNEVTRIY | 349 | 8 | | 4055 |
| Kallikrein | TQEPALGTTCY | 143 | 11 | 0.0190 | 4056 |
| PSA | TQEPALGTTCY | 139 | 11 | 0.0190 | 4057 |
| PSM | TSLFEPPPPGY | 141 | 11 | | 4058 |
| PSM | TYELVEKFY | 558 | 9 | 0.0010 | 4059 |
| PAP | VSGLQMALDVY | 293 | 11 | | 4060 |
| Kallikrein | VSHSFPHPLY | 92 | 10 | 0.1500 | 4061 |
| PSA | VSHSFPHPLY | 88 | 10 | 0.1500 | 4062 |
| PSM | WGEVKRQIY | 725 | 9 | 0.0010 | 4063 |
| PAP | WSKVYDPLY | 206 | 9 | 0.0046 | 4064 |
| PAP | YASCHLTELY | 310 | 10 | 0.5500 | 4065 |
| PSM | YFAPGVKSY | 234 | 9 | | 4066 |
| PSM | YHSVYETY | 552 | 8 | | 4067 |
| PSM | YPANEYAY | 272 | 8 | | 4068 |

[0449] TABLE XVI
Prostate A03 Motif Peotides with Binding Data

| | | | | | |
|---|---|---|---|---|---|
| | | | No. of | | Seq. |
| | | | Amino | | Id. |
| Protein | Sequence | Position | Acids | A*0301 | No. |

| | | | | | |
|---|---|---|---|---|---|
| PSM | AAAETLSEVA | 741 | 10 | | 4069 |
| PSM | AAETLSEVA | 742 | 9 | | 4070 |
| PSM | AAFTVQAA | 735 | 8 | | 4071 |
| PSM | AAFTVQAAA | 735 | 9 | | 4072 |
| PSA | AAHCIRNK | 59 | 8 | | 4073 |
| PSA | AAPLILSR | 13 | 8 | | 4074 |
| PAP | AAPLLLAR | 3 | 8 | | 4075 |
| PAP | AAPLLLARA | 3 | 9 | | 4076 |
| PAP | AAPLLLARAA | 3 | 10 | | 4077 |
| PAP | AASLSLGF | 11 | 8 | | 4078 |
| PAP | AASLSLGFLF | 11 | 10 | | 4079 |
| PSM | AAVVHEIVR | 392 | 9 | | 4080 |
| PSM | AAVVHEIVRSF | 392 | 11 | | 4081 |
| PSM | ADKIYSISMK | 608 | 10 | | 4082 |
| PSM | ADKIYSISMKH | 608 | 11 | | 4083 |
| PSM | ADSSIEGNY | 452 | 9 | | 4084 |
| PSM | ADYFAPGVK | 232 | 9 | 0.0006 | 4085 |
| PSM | ADYFAPGVKSY | 232 | 11 | | 4086 |
| PSM | AFIDPLGLPDR | 674 | 11 | | 4087 |
| PSM | AFLDELKA | 60 | 8 | | 4088 |
| PSM | AFTVQAAA | 736 | 8 | | 4089 |
| PSM | AGAKGVILY | 220 | 9 | | 4090 |
| PSM | AGALVLAGGF | 23 | 10 | | 4091 |
| PSM | AGALVLAGGFF | 23 | 11 | | 4092 |
| PSM | AGDPLTPGY | 264 | 9 | | 4093 |
| PSM | AGDPLTPGYPA | 264 | 11 | | 4094 |
| PSM | AGESFPGIY | 701 | 9 | | 4095 |
| PSM | AGESFPGIYDA | 701 | 11 | | 4096 |
| PSM | AGGFFLLGF | 29 | 9 | | 4097 |
| PSM | AGGFFLLGFLF | 29 | 11 | | 4098 |
| Kallikrein | AGLWTGGK | 199 | 8 | | 4099 |
| PSA | AGRWTGGK | 195 | 8 | | 4100 |
| PSM | AGTEQNFQLA | 84 | 10 | | 4101 |
| PSM | AGTEQNFQLAK | 84 | 11 | | 4102 |
| PSM | ALFDIESK | 711 | 8 | | 4103 |
| Kallikrein | ALGTTCYA | 147 | 8 | | 4104 |
| PSA | ALGTTCYA | 143 | 8 | | 4105 |
| Kallikrein | ALPEKPAVY | 235 | 9 | | 4106 |
| Kallikrein | ALPEKPAVYTK | 235 | 11 | | 4107 |
| PSA | ALPERPSLY | 231 | 9 | 0.0170 | 4108 |
| PSA | ALPERPSLYTK | 231 | 11 | | 4109 |
| Kallikrein | ALSVGCTGA | 9 | 9 | | 4110 |
| PSM | ALVLAGGF | 25 | 8 | | 4111 |
| PSM | ALVLAGGFF | 25 | 9 | | 4112 |
| PAP | AMTNLAALF | 116 | 9 | | 4113 |
| PAP | ASCHLTELY | 311 | 9 | 0.0002 | 4114 |
| PAP | ASCHLTELYF | 311 | 10 | | 4115 |
| PSM | ASGRARYTK | 531 | 9 | 0.0086 | 4116 |
| PSM | ASKFSERLQDF | 643 | 11 | | 4117 |
| PAP | ASLSLGFLF | 12 | 9 | | 4118 |
| PSM | ASWDAEEF | 419 | 8 | | 4119 |
| PSM | ATARRPRWLCA | 13 | 11 | | 4120 |
| PAP | ATEDTMTK | 227 | 8 | 0.0003 | 4121 |
| PAP | ATEDTMTKLR | 227 | 10 | | 4122 |
| PAP | ATLGKLSGLH | 189 | 10 | | 4123 |
| PSM | ATNITPKH | 49 | 8 | | 4124 |
| PSM | ATNITPKHNMK | 49 | 11 | | 4125 |
| PAP | ATQIPSYK | 274 | 8 | 0.0180 | 4126 |
| PAP | ATQIPSYKK | 274 | 9 | 0.1000 | 4127 |
| PSM | AVATARRPR | 11 | 9 | | 4128 |
| PSA | AVCGGVLVH | 44 | 9 | | 4129 |
| PSM | AVGLPSIPVH | 286 | 10 | | 4130 |
| PSM | AVKNFTEIA | 635 | 9 | | 4131 |
| PSM | AVKNFTEIASK | 635 | 11 | | 4132 |
| Kallikrein | AVPLIQSR | 17 | 8 | | 4133 |
| PSM | AVVHEIVR | 393 | 8 | | 4134 |
| PSM | AVVHEIVRSF | 393 | 10 | | 4135 |
| PSM | AVVLRKYA | 601 | 8 | | 4136 |
| PSM | AVVLRKYADK | 601 | 10 | 0.0026 | 4137 |
| Kallikrein | AVYSHGWA | 41 | 8 | | 4138 |
| Kallikrein | AVYSHGWAM | 41 | 9 | | 4139 |
| Kallikrein | AVYTKVVH | 241 | 8 | | 4140 |
| Kallikrein | AVYTKVVHY | 241 | 9 | | 4141 |
| Kallikrein | AVYTKVVHYR | 241 | 10 | | 4142 |
| Kallikrein | AVYTKVVHYRK | 241 | 11 | | 4143 |
| PSM | CAGALVLA | 22 | 8 | | 4144 |
| PSM | CAGALVLAGGF | 22 | 11 | | 4145 |
| Kallikrein | CAGLWTGGK | 198 | 9 | | 4146 |
| PSA | CAGRWTGGK | 194 | 9 | 0.0006 | 4147 |
| Kallikrein | CALPEKPA | 234 | 8 | | 4148 |
| Kallikrein | CALPEKPAVY | 234 | 10 | | 4149 |
| PSA | CALPERPSLY | 230 | 10 | | 4150 |
| PSA | CAQVHPQK | 180 | 8 | | 4151 |
| PSA | CAQVHPQKVTK | 180 | 11 | | 4152 |
| Kallikrein | CARAYSEK | 184 | 8 | | 4153 |
| PSM | CSGKIVIA | 196 | 8 | | 4154 |
| PSM | CSGKIVIAR | 196 | 9 | | 4155 |
| PSM | CSGKIVIARY | 196 | 10 | 0.0600 | 4156 |
| PAP | CSPSCPLER | 347 | 9 | 0.0040 | 4157 |
| PAP | CSPSCPLERF | 347 | 10 | | 4158 |
| PAP | CSPSCPLEREA | 347 | 11 | | 4159 |
| Kallikrein | CTGAVPLIQSR | 14 | 11 | | 4160 |
| PSM | CTPLMYSLVH | 466 | 10 | | 4161 |
| PSM | DALFDIESK | 710 | 9 | 0.0006 | 4162 |
| PSM | DAQKLLEK | 301 | 8 | | 4163 |
| PSM | DCRDYAVVLR | 596 | 10 | | 4164 |
| PSM | DCRDYAVVLRK | 596 | 11 | | 4165 |
| PSM | DCTPLMYSLVH | 465 | 11 | | 4166 |
| PSA | DDSSHDLMLLR | 111 | 11 | | 4167 |
| PSM | DFDKSNPIVLR | 652 | 11 | | 4168 |
| PSM | DFEVFFQR | 520 | 8 | | 4169 |
| PSM | DFFKLERDMK | 184 | 10 | | 4170 |
| PAP | DFIATLGK | 186 | 8 | | 4171 |
| PSM | DGNEIFNTSLF | 134 | 11 | | 4172 |
| PSM | DIESKVDPSK | 714 | 10 | 0.0003 | 4173 |
| PSM | DIESKVDPSKA | 714 | 11 | | 4174 |
| PSM | DIVPPFSA | 156 | 8 | | 4175 |
| PSM | DIVPPFSAF | 156 | 9 | | 4176 |
| PAP | DLFGIWSK | 201 | 8 | | 4177 |
| PAP | DLFGIWSKVY | 201 | 10 | | 4178 |
| PSA | DLHVISNDVCA | 171 | 11 | | 4179 |
| Kallikrein | DLMLLRLSEPA | 120 | 11 | | 4180 |
| PSA | DLMLLRLSEPA | 116 | 11 | | 4181 |
| PSA | DLPTQEPA | 136 | 8 | | 4182 |
| PSM | DLVYVNYA | 173 | 8 | | 4183 |
| PSM | DLVYVNYAR | 173 | 9 | | 4184 |
| Kallikrein | DMCARAYSEK | 182 | 10 | | 4185 |
| PSM | DMKINCSGK | 191 | 9 | | 4186 |
| PSA | DMSLLKNR | 98 | 8 | 0.0003 | 4187 |
| PSA | DMSLLKNRF | 98 | 9 | | 4188 |
| PSA | DMSLLKNRFLR | 98 | 11 | | 4189 |
| PSM | DSAVATAR | 9 | 8 | | 4190 |
| PSM | DSAVATARR | 9 | 9 | | 4191 |
| PSM | DSAVATARRPR | 9 | 11 | | 4192 |
| PSM | DSLFSAVK | 630 | 8 | | 4193 |
| PSM | DSLFSAVKNF | 630 | 10 | | 4194 |
| Kallikrein | DSSHDLMLLR | 116 | 10 | | 4195 |
| PSA | DSSHDLMLLR | 112 | 10 | | 4196 |
| PSM | DSSIEGNY | 453 | 8 | | 4197 |
| PSM | DSSIEGNYTLR | 453 | 11 | | 4198 |
| PSM | DSSWRGSLK | 316 | 9 | 0.0032 | 4199 |
| PSM | DSVELAHY | 106 | 8 | | 4200 |
| PAP | DTFPTDPIK | 51 | 9 | 0.0001 | 4201 |
| Kallikrein | DTGQRVPVSH | 85 | 10 | | 4202 |
| PSA | DTGQVFQVSH | 81 | 10 | | 4203 |
| PAP | DTTVSGLQMA | 290 | 10 | | 4204 |
| PSA | DVCAQVHPQK | 178 | 10 | 0.0007 | 4205 |
| PAP | DVDRTLMSA | 108 | 9 | | 4206 |
| PSM | DVLLSYPNK | 114 | 9 | 0.0006 | 4207 |
| PSM | DVLLSYPNKTH | 114 | 11 | | 4208 |
| PAP | DVYNGLLPPY | 301 | 10 | | 4209 |
| PAP | DVYNGLLPPYA | 301 | 11 | | 4210 |
| PSM | EATNITPK | 48 | 8 | | 4211 |
| PSM | EATNITPKH | 48 | 9 | | 4212 |
| PSM | EAVGLPSIPVH | 285 | 11 | | 4213 |
| PAP | ECMTTNSH | 371 | 8 | | 4214 |
| PSM | EDFFKLER | 183 | 8 | | 4215 |
| PSM | EDFFKLERDMK | 183 | 11 | | 4216 |
| PAP | EDQLLYLPF | 150 | 9 | | 4217 |
| PAP | EDQLLYLPFR | 150 | 10 | | 4218 |
| Kallikrein | EDSSHDLMLLR | 115 | 11 | | 4219 |
| Kallikrein | EDTGQRVPVSH | 84 | 11 | | 4220 |
| PSA | EDTGQVFQVSH | 80 | 11 | | 4221 |
| PAP | EDTMTKLR | 229 | 8 | | 4222 |
| PSM | EFGLDSVELA | 102 | 10 | | 4223 |
| PSM | EFGLDSVELAH | 102 | 11 | | 4224 |
| PSM | EFGLLGSTEWA | 425 | 11 | | 4225 |
| PAP | EFQKRLHPY | 176 | 9 | | 4226 |
| PAP | EFQKRLHPYK | 176 | 10 | | 4227 |
| PSM | EFSGMPRISK | 505 | 10 | | 4228 |
| PSM | EGDLVYVNY | 171 | 9 | | 4229 |
| PSM | EGDLVYVNYA | 171 | 10 | | 4230 |
| PSM | EGDLVYVNYAR | 171 | 11 | | 4231 |
| PSM | EGFEGKSLY | 486 | 9 | | 4232 |
| PSM | EGKSLYESWTK | 489 | 11 | | 4233 |
| PSM | EGWRPRRTILF | 408 | 11 | | 4234 |
| PSM | EIASKFSER | 641 | 9 | 0.0006 | 4235 |
| PSM | EIFNTSLF | 137 | 8 | | 4236 |
| PAP | EILNHMKR | 266 | 8 | | 4237 |
| PAP | EILNHMKRA | 266 | 9 | | 4238 |
| PSM | EIVRSFGTLK | 397 | 10 | | 4239 |
| PSM | EIVRSFGTLKK | 397 | 11 | | 4240 |
| PSM | ELAHYDVLLSY | 109 | 11 | | 4241 |
| PSM | ELANSIVLPF | 586 | 10 | | 4242 |
| PAP | ELESETLK | 166 | 8 | | 4243 |
| PAP | ELGEYIRK | 80 | 8 | | 4244 |
| PAP | ELGEYIRKR | 80 | 9 | | 4245 |
| PAP | ELGEYIRKRY | 80 | 10 | | 4246 |
| PAP | ELGEYIRKRYR | 80 | 11 | | 4247 |
| PSM | ELKAENIK | 64 | 8 | | 4248 |
| PSM | ELKAENIKK | 64 | 9 | | 4249 |
| PSM | ELKAENIKKF | 64 | 10 | | 4250 |
| PAP | ELKFVTLVF | 34 | 9 | | 4251 |
| PAP | ELKFVTLVFR | 34 | 10 | 0.0014 | 4252 |
| PAP | ELKFVTLVFRH | 34 | 11 | | 4253 |
| PSM | ELKSPDEGF | 480 | 9 | | 4254 |
| PAP | ELSELSLLSLY | 237 | 11 | | 4255 |
| PAP | ELSLLSLY | 240 | 8 | | 4256 |
| PAP | ELSLLSLYGH | 240 | 11 | | 4257 |
| PSM | ELVEKFYDPMF | 560 | 11 | | 4258 |
| PAP | ELYFEKGEY | 317 | 9 | | 4259 |
| PAP | ELYFEKGEYF | 317 | 10 | | 4260 |
| PSM | EMKTYSVSF | 621 | 9 | 0.0005 | 4261 |
| PAP | EMYYRNETQH | 328 | 10 | | 4262 |
| PAP | ESETLKSEEF | 168 | 10 | | 4263 |
| PSM | ESFPGIYDA | 703 | 9 | | 4264 |
| PSM | ESFPGIYDALF | 703 | 11 | | 4265 |
| PSM | ESKVDPSK | 716 | 8 | | 4266 |
| PSM | ESKVDPSKA | 716 | 9 | | 4267 |
| PAP | ESSWPQGF | 60 | 8 | | 4268 |
| PAP | ESYKHEQVY | 95 | 9 | 0.0002 | 4269 |
| PAP | ESYKHEQVYIR | 95 | 11 | | 4270 |
| PSM | ETDSAVATA | 7 | 9 | | 4271 |
| PSM | ETDSAVATAR | 7 | 10 | | 4272 |
| PSM | ETDSAVATARR | 7 | 11 | | 4273 |
| PAP | ETLKSEEF | 170 | 8 | | 4274 |
| PAP | ETLKSEEFQK | 170 | 10 | 0.0004 | 4275 |
| PAP | ETLKSEEFQKR | 170 | 11 | | 4276 |
| PSM | ETNKFSGY | 542 | 8 | | 4277 |
| PSM | ETNKFSGYPLY | 542 | 11 | | 4278 |
| PSM | ETYELVEK | 557 | 8 | | 4279 |
| PSM | ETYELVEKF | 557 | 9 | | 4280 |
| PSM | ETYELVEKFY | 557 | 10 | 0.0006 | 4281 |
| PSM | EVFFQRLGIA | 522 | 10 | | 4282 |
| PSM | EVKRQIYVA | 727 | 9 | | 4283 |
| PSM | EVKRQIYVAA | 727 | 10 | | 4284 |
| PSM | EVKRQIYVAAF | 727 | 11 | | 4285 |
| PSM | FAPGVKSY | 235 | 8 | | 4286 |
| PSM | FASWDAEEF | 418 | 9 | | 4287 |
| PSM | FDCRDYAVVLR | 595 | 11 | | 4288 |
| PSM | FDIESKVDPSK | 713 | 11 | | 4289 |
| PSM | FDKSNPIVLR | 653 | 10 | | 4290 |
| PSM | FDSLFSAVK | 629 | 9 | | 4291 |
| PSM | FDSLFSAVKNF | 629 | 11 | | 4292 |
| PSM | FFKLERDMK | 185 | 9 | | 4293 |
| PSM | FFLLGFLF | 32 | 8 | | 4294 |
| PSM | FFLLGFLFGWF | 32 | 11 | | 4295 |
| PSM | FFQRLGIA | 524 | 8 | | 4296 |
| PSM | FFQRLGIASGR | 524 | 11 | | 4297 |
| PAP | FFWLDRSVLA | 23 | 10 | | 4298 |
| PAP | FFWLDRSVLAK | 23 | 11 | | 4299 |
| PSM | FGGIDPQSGA | 383 | 10 | | 4300 |
| PSM | FGGIDPQSGAA | 383 | 11 | | 4301 |
| PAP | FGIWSKVY | 203 | 8 | | 4302 |
| PSM | FGLDSVELA | 103 | 9 | | 4303 |
| PSM | FGLDSVELAH | 103 | 10 | | 4304 |
| PSM | FGLDSVELAHY | 103 | 11 | | 4305 |
| PSM | FGLLGSTEWA | 426 | 10 | | 4306 |
| PSM | FGTLKKEGWR | 402 | 10 | | 4307 |
| PSM | FGWFIKSSNEA | 39 | 11 | | 4308 |
| PSM | FIDPLGLPDR | 675 | 10 | | 4309 |
| PSM | FIKSSNEA | 42 | 8 | | 4310 |
| PSM | FLDELKAENIK | 61 | 11 | | 4311 |
| PSM | FLFGWFIK | 37 | 8 | | 4312 |
| PAP | FLFLLFFWLDR | 18 | 11 | | 4313 |
| PAP | FLLFFWLDR | 20 | 9 | 0.0024 | 4314 |
| PSM | FLLGFLFGWF | 33 | 10 | | 4315 |
| PAP | FLNESYKH | 92 | 8 | | 4316 |
| PSA | FLRPGDDSSH | 106 | 10 | | 4317 |
| PSA | FLTLSVTWIGA | 3 | 11 | | 4318 |
| PSM | FLYNFTQIPH | 73 | 10 | 0.0102 | 4319 |
| PSM | FSAVKNFTEIA | 633 | 11 | | 4320 |
| PSM | FSERLQDF | 646 | 8 | | 4321 |
| PSM | FSERLQDFDK | 646 | 10 | 0.0003 | 4322 |
| PSM | FSGMPRISK | 506 | 9 | | 4323 |
| PSM | FSGYPLYH | 546 | 8 | | 4324 |
| PSM | FSGYPLYHSVY | 546 | 11 | | 4325 |
| PSM | FSTQKVKMH | 337 | 9 | | 4326 |
| PSM | FSTQKVKMHIH | 337 | 11 | | 4327 |
| PSM | FTEIASKF | 639 | 8 | | 4328 |
| PSM | FTEIASKFSER | 639 | 11 | | 4329 |
| PSM | FTGNFSTQK | 333 | 9 | | 4330 |
| PSM | FTGNFSTQKVK | 333 | 11 | | 4331 |
| PSM | FTQIPHLA | 77 | 8 | | 4332 |
| PAP | FVTLVFRH | 37 | 8 | | 4333 |
| PAP | FVTLVFRHGDR | 37 | 11 | | 4334 |
| PSA | GAAPLILSR | 12 | 9 | 0.0150 | 4335 |
| PSM | GAAVVHEIVR | 391 | 10 | | 4336 |
| PSM | GAGDPLTPGY | 263 | 10 | | 4337 |
| PSM | GAKGVILY | 221 | 8 | | 4338 |
| PSM | GALVLAGGF | 24 | 9 | | 4339 |
| PSM | GALVLAGGFF | 24 | 10 | | 4340 |
| PSM | GAVEPDRY | 364 | 8 | | 4341 |
| Kallikrein | GAVPLIQSR | 16 | 9 | | 4342 |
| PAP | GCSPSCPLER | 346 | 10 | | 4343 |
| PAP | GCSPSCPLERF | 346 | 11 | | 4344 |
| PSM | GDLVYVNY | 172 | 8 | | 4345 |
| PSM | GDLVYVNYA | 172 | 9 | | 4346 |
| PSM | GDLVYVNYAR | 172 | 10 | | 4347 |
| PSM | GDPLTPGY | 265 | 8 | | 4348 |
| PSM | GDPLTPGYPA | 265 | 10 | | 4349 |
| PAP | GDRSPIDTF | 45 | 9 | | 4350 |
| PSM | GFEGKSLY | 487 | 8 | | 4351 |
| PSM | GFFLLGFLF | 31 | 9 | 0.0005 | 4352 |
| PSM | GFLFGWFIK | 36 | 9 | 0.0007 | 4353 |
| PAP | GFLFLLFF | 17 | 8 | | 4354 |
| PSM | GFTGNFSTQK | 332 | 10 | | 4355 |
| PSM | GGFFLLGF | 30 | 8 | | 4356 |
| PSM | GGFFLLGFLF | 30 | 10 | | 4357 |
| PSM | GGHRDSWVF | 375 | 9 | | 4358 |
| PSM | GGIDPQSGA | 384 | 9 | | 4359 |
| PSM | GGIDPQSGAA | 384 | 10 | | 4360 |
| PSM | GGMVFELA | 581 | 8 | | 4361 |
| PSM | GGSAPPDSSWR | 310 | 11 | | 4362 |
| PAP | GGVLVNEILNH | 260 | 11 | | 4363 |
| Kallikrein | GGWECEKH | 27 | 8 | | 4364 |
| PSA | GGWECEKH | 23 | 8 | | 4365 |
| PSM | GIASGRAR | 529 | 8 | | 4366 |
| PSM | GIASGRARY | 529 | 9 | | 4367 |
| PSM | GIASGRARYTK | 529 | 11 | | 4368 |
| PSM | GIDPQSGA | 385 | 8 | | 4369 |
| PSM | GIDPQSGAA | 385 | 9 | | 4370 |
| PAP | GIHKQKEK | 248 | 8 | | 4371 |
| PAP | GIHKQKEKSR | 248 | 10 | | 4372 |
| Kallikrein | GITSWGPEPCA | 225 | 11 | | 4373 |
| PSA | GITSWGSEPCA | 221 | 11 | | 4374 |
| PAP | GIWSKVYDPLY | 204 | 11 | | 4375 |
| PSM | GLDSVELA | 104 | 8 | | 4376 |
| PSM | GLDSVELAH | 104 | 9 | | 4377 |
| PSM | GLDSVELAHY | 104 | 10 | | 4378 |
| PAP | GLHGQDLF | 196 | 8 | | 4379 |
| PSM | GLLGSTEWA | 427 | 9 | | 4380 |
| PAP | GLLPPYASCH | 305 | 10 | | 4381 |
| PSM | GLPDRPFY | 680 | 8 | | 4382 |
| PSM | GLPDRPFYR | 680 | 9 | 0.0460 | 4383 |
| PSM | GLPDRPFYRH | 680 | 10 | | 4384 |
| PSM | GLPSIPVH | 288 | 8 | | 4385 |
| Kallikrein | GLPTQEPA | 140 | 8 | | 4386 |
| PAP | GLQMALDVY | 295 | 9 | | 4387 |
| PAP | GMEQHYELGEY | 74 | 11 | | 4388 |
| PSM | GMPEGDLVY | 168 | 9 | 0.0007 | 4389 |
| PSM | GSAPPDSSWR | 311 | 10 | 0.0006 | 4390 |
| PSA | GSEPCALPER | 226 | 10 | | 4391 |
| PSM | GSGNDFEVF | 516 | 9 | | 4392 |
| PSM | GSGNDFEVFF | 516 | 10 | | 4393 |
| Kallikrein | GSIEPEEF | 158 | 8 | | 4394 |
| PSA | GSIEPEEF | 154 | 8 | | 4395 |
| Kallikrein | GSIEPEEFLR | 158 | 10 | | 4396 |
| PSM | GSTEWAEENSR | 430 | 11 | | 4397 |
| PSM | GTEQNFQLA | 85 | 9 | | 4398 |
| PSM | GTEQNFQLAK | 85 | 10 | | 4399 |
| PSM | GTLKKEGWR | 403 | 9 | | 4400 |
| PSM | GTLKKEGWRPR | 403 | 11 | | 4401 |
| PSM | GTLRGAVEPDR | 360 | 11 | | 4402 |
| PSM | GVILYSDPA | 224 | 9 | | 4403 |
| PSM | GVILYSDPADY | 224 | 11 | | 4404 |
| PAP | GVLVNEILNH | 261 | 10 | | 4405 |
| Kallikrein | HCGGVLVH | 49 | 8 | | 4406 |
| PAP | HDTTVSGLQMA | 289 | 11 | | 4407 |
| PAP | HGDRSPIDTF | 44 | 10 | | 4408 |
| PAP | HGQDLFGIWSK | 198 | 11 | | 4409 |
| PSM | HIHSTNEVTR | 345 | 10 | | 4410 |
| PSM | HLAGTEQNF | 82 | 9 | | 4411 |
| Kallikrein | HLLSNDMCA | 177 | 9 | | 4412 |
| Kallikrein | HLLSNDMCAR | 177 | 10 | | 4413 |
| Kallikrein | HLLSNDMCARA | 177 | 11 | | 4414 |
| PAP | HLTELYFEK | 314 | 9 | 0.2700 | 4415 |
| PSM | HLTVAQVR | 573 | 8 | | 4416 |
| PAP | HMKRATQIPSY | 270 | 11 | | 4417 |
| Kallikrein | HSFPHPLY | 94 | 8 | 0.0890 | 4418 |
| PSA | HSFPHPLY | 90 | 8 | 0.0890 | 4419 |
| Kallikrein | HSQPWQVA | 34 | 8 | | 4420 |
| Kallikrein | HSQPWQVAVY | 34 | 10 | | 4421 |
| PSA | HSQPWQVLVA | 30 | 10 | | 4422 |
| PSM | HSTNEVTR | 347 | 8 | | 4423 |
| PSM | HSTNEVTRIY | 347 | 10 | 0.0005 | 4424 |
| PSA | HVISNDVCA | 173 | 9 | | 4425 |
| PSM | HVIYAPSSH | 689 | 9 | | 4426 |
| PSM | HVIYAPSSHNK | 689 | 11 | | 4427 |
| Kallikrein | IALSVGCTGA | 8 | 10 | | 4428 |
| PSM | IARYGKVF | 202 | 8 | | 4429 |
| PSM | IARYGKVFR | 202 | 9 | | 4430 |
| PSM | IASGRARY | 530 | 8 | | 4431 |
| PSM | IASGRARYTK | 530 | 10 | | 4432 |
| PSM | IASKFSER | 642 | 8 | | 4433 |
| PAP | IATLGKLSGLH | 188 | 11 | | 4434 |
| PSM | IDPLGLPDR | 676 | 9 | | 4435 |
| PSM | IDPLGLPDRPF | 676 | 11 | | 4436 |
| PSM | IDPQSGAA | 386 | 8 | | 4437 |
| PSM | IDPQSGAAVVH | 386 | 11 | | 4438 |
| PAP | IDTFPTDPIK | 50 | 10 | | 4439 |
| PSA | IGAAPLILSR | 11 | 10 | | 4440 |
| PSM | IGYYDAQK | 297 | 8 | | 4441 |
| PSM | IINEDGNEIF | 130 | 10 | | 4442 |
| PSM | ILFASWDA | 416 | 8 | | 4443 |
| PSM | ILFASWDAEEF | 416 | 11 | | 4444 |
| PSM | ILGGHRDSWVF | 373 | 11 | | 4445 |
| PSA | ILLGRHSLF | 69 | 9 | | 4446 |
| PSA | ILLGRHSLFH | 69 | 10 | | 4447 |
| PAP | ILLWQPIPVH | 135 | 10 | | 4448 |
| PAP | ILNHMKRA | 267 | 8 | | 4449 |
| PSM | ILYSDPADY | 226 | 9 | | 4450 |
| PSM | ILYSDPADYF | 226 | 10 | | 4451 |
| PSM | ILYSDPADYFA | 226 | 11 | | 4452 |
| PSM | ISKLGSGNDF | 512 | 10 | | 4453 |
| PSM | ISMKHPQEMK | 614 | 10 | 0.1900 | 4454 |
| PSA | ISNDVCAQVH | 175 | 10 | | 4455 |
| PSM | ITPKHNMK | 52 | 8 | | 4456 |
| PSM | ITPKHNMKA | 52 | 9 | | 4457 |
| PSM | ITPKHNMKAF | 52 | 10 | | 4458 |
| Kallikrein | ITSWGPEPCA | 226 | 10 | | 4459 |
| PSA | ITSWGSEPCA | 222 | 10 | | 4460 |
| Kallikrein | IYGGWEGEK | 25 | 9 | 0.0410 | 4461 |
| PSA | IVGGWECEK | 21 | 9 | 0.0410 | 4462 |
| Kallikrein | IVGGWECEKH | 25 | 10 | | 4463 |
| PSA | IVGGWECEKH | 21 | 10 | | 4464 |
| PSM | IVIARYGK | 200 | 8 | | 4465 |
| PSM | IVIARYGKVF | 200 | 10 | | 4466 |
| PSM | IVIARYGKVFR | 200 | 11 | | 4467 |
| PSM | IVLPFDCR | 591 | 8 | | 4468 |
| PSM | IVLPFDCRDY | 591 | 10 | | 4469 |
| PSM | IVLPFDCRDYA | 591 | 11 | | 4470 |
| PSM | IVPPFSAF | 157 | 8 | | 4471 |
| PSM | IVRSFGTLK | 398 | 9 | 0.1700 | 4472 |
| PSM | IVRSFGTLKK | 398 | 10 | 0.0260 | 4473 |
| PSM | KAENIKKF | 66 | 8 | | 4474 |
| PSM | KAENIKKFLY | 66 | 10 | | 4475 |
| PSM | KAFLDELK | 59 | 8 | | 4476 |
| PSM | KAFLDELKA | 59 | 9 | | 4477 |
| PSM | KAWGEVKR | 723 | 8 | | 4478 |
| PSM | KAWGEVKRQIY | 723 | 11 | | 4479 |
| PAP | KDFIATLGK | 185 | 9 | 0.0006 | 4480 |
| PAP | KFLNESYK | 91 | 8 | | 4481 |
| PAP | KFLNESYKH | 91 | 9 | | 4482 |
| PSM | KFLYNFTQIPH | 72 | 11 | | 4483 |
| PSA | KFMLCAGR | 190 | 8 | | 4484 |
| PSM | KFSERLQDF | 645 | 9 | | 4485 |
| PSM | KFSERLQDFDK | 645 | 11 | | 4486 |
| PSM | KESGYPLY | 545 | 8 | | 4487 |
| PSM | KFSGYPLYH | 545 | 9 | | 4488 |
| PAP | KFVTLVFR | 36 | 8 | | 4489 |
| PAP | KFVTLVFRH | 36 | 9 | | 4490 |
| PSM | KFYDPMFK | 564 | 8 | | 4491 |
| PSM | KFYDPMFKY | 564 | 9 | | 4492 |
| PSM | KFYDPMFKYH | 564 | 10 | | 4493 |
| PAP | KGEYFVEMY | 322 | 9 | 0.0002 | 4494 |
| PAP | KGEYFVEMYY | 322 | 10 | 0.0057 | 4495 |
| PAP | KGEYFVEMYYR | 322 | 11 | | 4496 |
| PSM | KGVILYSDPA | 223 | 10 | | 4497 |
| PSM | KINCSGKIVIA | 193 | 11 | | 4498 |
| PSM | KIVIARYGK | 199 | 9 | 0.0740 | 4499 |
| PSM | KIVIARYGKVF | 199 | 11 | | 4500 |
| PSM | KIYSISMK | 610 | 8 | | 4501 |
| PSM | KIYSISMKH | 610 | 9 | 0.1800 | 4502 |
| PSM | KLGSGNDF | 514 | 8 | | 4503 |
| PSM | KLGSGNDFEVF | 514 | 11 | | 4504 |
| PAP | KLIMYSAH | 282 | 8 | | 4505 |
| PSM | KLLEKMGGSA | 304 | 10 | | 4506 |
| PSA | KLQCVDLH | 166 | 8 | | 4507 |
| PAP | KLSGLHGQDLF | 193 | 11 | | 4508 |
| PAP | KSEEFQKR | 173 | 8 | | 4509 |
| PAP | KSEEFQKRLH | 173 | 10 | | 4510 |
| PSM | KSLYESWTK | 491 | 9 | 0.4000 | 4511 |
| PSM | KSLYESWTKK | 491 | 10 | 0.3200 | 4512 |
| PSM | KSNPIVLR | 655 | 8 | | 4513 |
| PSM | KSPDEGFEGK | 482 | 10 | 0.0044 | 4514 |
| PSA | KSVILLGR | 66 | 8 | | 4515 |
| PSA | KSVILLGRH | 66 | 9 | 0.0025 | 4516 |
| PSM | KTYSVSFDSLF | 623 | 11 | | 4517 |
| PSM | KVFRGNKVK | 207 | 9 | 0.1600 | 4518 |
| PSM | KVFRGNKVKNA | 207 | 11 | | 4519 |
| PSM | KVKNAQLA | 213 | 8 | | 4520 |
| PSM | KVKNAQLAGA | 213 | 10 | | 4521 |
| PSM | KVKNAQLAGAK | 213 | 11 | | 4522 |
| Kallikrein | KVLGLPTQEPA | 137 | 11 | | 4523 |
| PSA | KVMDLPTQEPA | 133 | 11 | | 4524 |
| PSM | KVPYNVGPGF | 324 | 10 | | 4525 |
| Kallikrein | KVTEFMLCA | 191 | 9 | | 4526 |
| PSA | KVTKFMLCA | 187 | 9 | | 4527 |
| PSA | KVTKFMLCAGR | 187 | 11 | | 4528 |
| Kallikrein | KVVHYRKWIK | 245 | 10 | 0.0450 | 4529 |
| PSA | KVVHYRKWIK | 241 | 10 | 0.0450 | 4530 |
| PSM | LAGAKGVILY | 219 | 10 | 0.0004 | 4531 |
| PSM | LAGGFELLGF | 28 | 10 | | 4532 |
| PSM | LAGTEQNF | 83 | 8 | | 4533 |
| PSM | LAGTEQNFQLA | 83 | 11 | | 4534 |
| PSM | LAHYDVLLSY | 110 | 10 | | 4535 |
| PSM | LAKQIQSQWK | 92 | 10 | 0.0031 | 4536 |
| PSM | LANSIVLPF | 587 | 9 | | 4537 |
| PAP | LARAASLSLGF | 8 | 11 | | 4538 |
| PSM | LCAGALVLA | 21 | 9 | | 4539 |
| Kallikrein | LCAGLWTGGK | 197 | 10 | | 4540 |
| PSA | LCAGRWTGGK | 193 | 10 | | 4541 |
| PSM | LDELKAENIK | 62 | 10 | | 4542 |
| PSM | LDELKAENIKK | 62 | 11 | | 4543 |
| PAP | LDRSVLAK | 26 | 8 | | 4544 |
| PAP | LDRSVLAKELK | 26 | 11 | | 4545 |
| PSM | LDSVELAH | 105 | 8 | | 4546 |
| PSM | LDSVELAHY | 105 | 9 | | 4547 |
| PAP | LDVYNGLLPPY | 300 | 11 | | 4548 |
| PSM | LFASWDAEEF | 417 | 10 | | 4549 |
| Kallikrein | LFEPEDTGQR | 80 | 10 | | 4550 |
| PSM | LFEPPPPGY | 143 | 9 | | 4551 |
| PAP | LFFWLDRSVLA | 22 | 11 | | 4552 |
| PAP | LFGIWSKVY | 202 | 9 | | 4553 |
| PSA | LFHPEDTGQVF | 76 | 11 | | 4554 |
| PAP | LFLLFFWLDR | 19 | 10 | | 4555 |
| PSM | LFSAVKNF | 632 | 8 | | 4556 |
| PAP | LGEYIRKR | 81 | 8 | | 4557 |
| PAP | LGEYIRKRY | 81 | 9 | 0.0002 | 4558 |
| PAP | LGEYIRKRYR | 81 | 10 | 0.0003 | 4559 |
| PAP | LGEYIRKRYRK | 81 | 11 | | 4560 |
| PSM | LGFLFGWF | 35 | 8 | | 4561 |
| PSM | LGFLFGWFIK | 35 | 10 | 0.0007 | 4562 |
| PAP | LGFLFLLF | 16 | 8 | | 4563 |
| PAP | LGFLFLLFF | 16 | 9 | | 4564 |
| PSM | LGGHRDSWVF | 374 | 10 | | 4565 |
| PSM | LGIASGRA | 528 | 8 | | 4566 |
| PSM | LGIASGRAR | 528 | 9 | 0.0006 | 4567 |
| PSM | LGIASGRARY | 528 | 10 | | 4568 |
| PAP | LGKLSGLH | 191 | 8 | | 4569 |
| PSM | LGLPDRPF | 679 | 8 | | 4570 |
| PSM | LGLPDRPFY | 679 | 9 | | 4571 |
| PSM | LGLPDRPFYR | 679 | 10 | | 4572 |
| PSM | LGLPDRPFYRH | 679 | 11 | | 4573 |
| Kallikrein | LGLPTQEPA | 139 | 9 | | 4574 |
| PSA | LGRHSLFH | 71 | 8 | | 4575 |
| PSM | LGSGNDFEVF | 515 | 10 | | 4576 |
| PSM | LGSGNDFEVFF | 515 | 11 | | 4577 |
| PSM | LLEKMGGSA | 305 | 9 | 0.0006 | 4578 |
| PAP | LLFFWLDR | 21 | 8 | | 4579 |
| PSM | LLGFLFGWF | 34 | 9 | | 4580 |
| PSM | LLGFLFGWFIK | 34 | 11 | | 4581 |
| PSA | LLGRHSLF | 70 | 8 | | 4582 |
| PSA | LLGRHSLFH | 70 | 9 | | 4583 |
| PSM | LLGSTEWA | 428 | 8 | | 4584 |
| PSM | LLHETDSA | 4 | 8 | | 4585 |
| PSM | LLHETDSAVA | 4 | 10 | 0.0005 | 4586 |
| Kallikrein | LLKHQSLR | 105 | 8 | | 4587 |
| PSA | LLKNRFLR | 101 | 8 | | 4588 |
| PAP | LLPPYASCH | 306 | 9 | 0.0010 | 4589 |
| PSM | LLQERGVA | 441 | 8 | | 4590 |
| PSM | LLQERGVAY | 441 | 9 | | 4591 |
| Kallikrein | LLRLSEPA | 123 | 8 | | 4592 |
| PSA | LLRLSEPA | 119 | 8 | | 4593 |
| Kallikrein | LLRLSEPAK | 123 | 9 | | 4594 |
| PAP | LLSLYGIH | 243 | 8 | | 4595 |
| PAP | LLSLYGIHK | 243 | 9 | 0.0760 | 4596 |
| PAP | LLSLYGIHKQK | 243 | 11 | | 4597 |
| Kallikrein | LLSNDMCA | 178 | 8 | | 4598 |
| Kallikrein | LLSNDMCAR | 178 | 9 | | 4599 |
| Kallikrein | LLSNDMGARA | 178 | 10 | | 4600 |
| Kallikrein | LLSNDMCARAY | 178 | 11 | | 4601 |
| PSM | LLSYPNKTH | 116 | 9 | 0.0006 | 4602 |
| PAP | LLWQPIPVH | 136 | 9 | | 4603 |
| PAP | LLYLPFRNCPR | 153 | 11 | | 4604 |
| PSM | LMFLERAF | 668 | 8 | | 4605 |
| Kallikrein | LMLLRLSEPA | 121 | 10 | | 4606 |
| PSA | LMLLRLSEPA | 117 | 10 | | 4607 |
| Kallikrein | LMLLRLSEPAK | 121 | 11 | | 4608 |
| PAP | LMSAMTNLA | 113 | 9 | 0.0005 | 4609 |
| PAP | LMSAMTNLAA | 113 | 10 | 0.0005 | 4610 |
| PSM | LMYSLVHNLTK | 469 | 11 | | 4611 |
| PAP | LSEDQLLY | 148 | 8 | | 4612 |
| PAP | LSEDQLLYLPF | 148 | 11 | | 4613 |
| PAP | LSELSLLSLY | 238 | 10 | 0.0005 | 4614 |
| PSA | LSEPAELTDA | 122 | 10 | | 4615 |
| PAP | LSGLHGQDLF | 194 | 10 | | 4616 |
| PAP | LSLGFLFLLF | 14 | 10 | | 4617 |
| PAP | LSLGFLFLLFF | 14 | 11 | | 4618 |
| PAP | LSLLSLYGIH | 241 | 10 | 0.0003 | 4619 |
| PAP | LSLLSLYGIHK | 241 | 11 | | 4620 |
| PAP | LSLYGIHK | 244 | 8 | | 4621 |
| PAP | LSLYGIHKQK | 244 | 10 | 0.0520 | 4622 |
| Kallikrein | LSNDMCAR | 179 | 8 | | 4623 |
| Kallikrein | LSNDMCARA | 179 | 9 | | 4624 |
| Kallikrein | LSNDMCARAY | 179 | 10 | | 4625 |
| Kallikrein | LSVGCTGA | 10 | 8 | | 4626 |
| PSA | LSVTWIGA | 6 | 8 | | 4627 |
| PSA | LSVTWIGAA | 6 | 9 | | 4628 |
| PSM | LSYPNKTH | 117 | 8 | | 4629 |
| PSM | LSYPNKTHPNY | 117 | 11 | | 4630 |
| PSA | LTAAHCIR | 57 | 8 | | 4631 |
| PSA | LTAAHCIRNK | 57 | 10 | 0.1400 | 4632 |
| Kallikrein | LTAAHCLK | 61 | 8 | | 4633 |
| Kallikrein | LTAAHCLKK | 61 | 9 | | 4634 |
| PAP | LTELYFEK | 315 | 8 | 0.0014 | 4635 |
| PAP | LTELYFEKGEY | 315 | 11 | | 4636 |
| PSA | LTLSVTWIGA | 4 | 10 | | 4637 |
| PSA | LTLSVTWIGAA | 4 | 11 | | 4638 |
| PSM | LTPGYPANEY | 268 | 10 | 0.0005 | 4639 |
| PSM | LTPGYPANEYA | 268 | 11 | | 4640 |
| PAP | LTQLGMEQH | 70 | 9 | | 4641 |
| PAP | LTQLGMEQHY | 70 | 10 | 0.0150 | 4642 |
| PSA | LVASRGRA | 37 | 8 | | 4643 |
| PSM | LVEKFYDPMF | 561 | 10 | | 4644 |
| PSM | LVEKFYDPMFK | 561 | 11 | | 4645 |
| PAP | LVFRHGDR | 40 | 8 | 0.0003 | 4646 |
| PSM | LVHNLTKELK | 473 | 10 | | 4647 |
| Kallikrein | LVHPQWVLTA | 54 | 10 | | 4648 |
| PSA | LVHPQWVLTA | 50 | 10 | | 4649 |
| Kallikrein | LVHPQWVLTAA | 54 | 11 | | 4650 |
| PSA | LVHPQWVLTAA | 50 | 11 | | 4651 |
| PSM | LVLAGGFF | 26 | 8 | | 4652 |
| PAP | LVNEILNH | 263 | 8 | | 4653 |
| PAP | LVNEILNHMK | 263 | 10 | 0.0560 | 4654 |
| PAP | LVNEILNHMKR | 263 | 11 | | 4655 |
| PSM | LVYVNYAR | 174 | 8 | | 4656 |
| Kallikrein | MCARAYSEK | 183 | 9 | | 4657 |
| PSA | MDLPTQEPA | 135 | 9 | | 4658 |
| PSM | MFKYHLTVA | 569 | 9 | | 4659 |
| Kallikrein | MLCAGLWTGGK | 196 | 11 | | 4660 |
| PSA | MLCAGRWTGGK | 192 | 11 | | 4661 |
| Kallikrein | MLLRLSEPA | 122 | 9 | | 4662 |
| PSA | MLLRLSEPA | 118 | 9 | | 4663 |
| Kallikrein | MLLRLSEPAK | 122 | 10 | | 4664 |
| PSM | MMNDQLMF | 663 | 8 | | 4665 |
| PSM | MMNDQLMFLER | 663 | 11 | | 4666 |
| PAP | MSAMTNLA | 114 | 8 | | 4667 |
| PAP | MSAMTNLAA | 114 | 9 | | 4668 |
| PAP | MSAMTNLAALF | 114 | 11 | | 4669 |
| Kallikrein | MSLLKHQSLR | 103 | 10 | | 4670 |
| PSA | MSLLKNRF | 99 | 8 | | 4671 |
| PSA | MSLLKNRFLR | 99 | 10 | 0.0070 | 4672 |
| PAP | MTNLAALF | 117 | 8 | | 4673 |
| PSM | NADSSIEGNY | 451 | 10 | | 4674 |
| PSM | NAQLAGAK | 216 | 8 | | 4675 |
| PSM | NCSGKIVIA | 195 | 9 | | 4676 |
| PSM | NCSGKIVIAR | 195 | 10 | | 4677 |
| PSM | NCSGKIVIARY | 195 | 11 | | 4678 |
| PSM | NDFEVFFQR | 519 | 9 | | 4679 |
| Kallikrein | NDMCARAY | 181 | 8 | | 4680 |
| Kallikrein | NDMCARAYSEK | 181 | 11 | | 4681 |
| PSM | NDQLMFLER | 665 | 9 | | 4682 |
| PSM | NDQLMFLERA | 665 | 10 | | 4683 |
| PSM | NDQLMFLERAF | 665 | 11 | | 4684 |
| PSA | NDVCAQVH | 177 | 8 | | 4685 |
| PSA | NDVCAQVHPQK | 177 | 11 | | 4686 |
| PSM | NFSTQKVK | 336 | 8 | | 4687 |
| PSM | NFSTQKVKMH | 336 | 10 | | 4688 |
| PSM | NFTEIASK | 638 | 8 | | 4689 |
| PSM | NFTEIASKF | 638 | 9 | 0.0005 | 4690 |
| PAP | NFTLPSWA | 220 | 8 | | 4691 |
| PSM | NFTQIPHLA | 76 | 9 | | 4692 |
| PSM | NGAGDPLTPGY | 262 | 11 | | 4693 |
| PAP | NGLLPPYA | 304 | 8 | | 4694 |
| PAP | NGLLPYASCH | 304 | 11 | | 4695 |
| PSM | NIKKFLYNF | 69 | 9 | | 4696 |
| PSM | NILNLNGA | 257 | 8 | | 4697 |
| PSM | NITPKHNMK | 51 | 9 | | 4698 |
| PSM | NITPKHNMKA | 51 | 10 | | 4699 |
| PSM | NITPKHNMKAF | 51 | 11 | | 4700 |
| Kallikrein | NLFEPEDTGQR | 79 | 11 | | 4701 |
| PSM | NLLHETDSA | 3 | 9 | 0.0006 | 4702 |
| PSM | NLLHETDSAVA | 3 | 11 | | 4703 |
| PSM | NLPGGGVQR | 247 | 9 | | 4704 |
| PSM | NMKAFLDELK | 57 | 10 | | 4705 |
| PSM | NMKAFLDELKA | 57 | 11 | | 4706 |
| Kallikrein | NMSLLKHQSLR | 102 | 11 | | 4707 |
| PSM | NSIVLPFDCR | 589 | 10 | | 4708 |
| Kallikrein | NSQVWLGR | 70 | 8 | | 4709 |
| Kallikrein | NSQVWLGRH | 70 | 9 | | 4710 |
| PSM | NSRLLQER | 438 | 8 | | 4711 |
| PSM | NSRLLQERGVA | 438 | 11 | | 4712 |
| PSM | NVGPGFTGNF | 328 | 10 | | 4713 |
| PSM | NVIGTLRGA | 357 | 9 | | 4714 |
| PSM | NVSDIVPPF | 153 | 9 | | 4715 |
| PSM | NVSDIVPPFSA | 153 | 11 | | 4716 |
| PSM | PADYFAPGVK | 231 | 10 | | 4717 |
| PSA | PAELTDAVK | 125 | 9 | 0.0002 | 4718 |
| Kallikrein | PAKITDVVK | 129 | 9 | | 4719 |
| Kallikrein | PALGTTCY | 146 | 8 | | 4720 |
| PSA | PALGTTCY | 142 | 8 | | 4721 |
| Kallikrein | PALGTTCYA | 146 | 9 | | 4722 |
| PSA | PALGTTCYA | 142 | 9 | | 4723 |
| PSM | PANEYAYR | 273 | 8 | | 4724 |
| PSM | PANEYAYRR | 273 | 9 | 0.0001 | 4725 |
| Kallikrein | PAVYTKVVH | 240 | 9 | | 4726 |
| Kallikrein | PAVYTKVVHY | 240 | 10 | | 4727 |
| Kallikrein | PAVYTKVVHYR | 240 | 11 | | 4728 |
| Kallikrein | PCALPEKPA | 233 | 9 | | 4729 |
| Kallikrein | PCALPEKPAVY | 233 | 11 | | 4730 |
| PSA | PCALPERPSLY | 229 | 11 | | 4731 |
| PSM | PDEGFEGK | 484 | 8 | | 4732 |
| PSM | PDEGFEGKSLY | 484 | 11 | | 4733 |
| PSM | PDRPFYRH | 682 | 8 | | 4734 |
| PSM | PDRPFYRHVIY | 682 | 11 | | 4735 |
| PSM | PDRYVILGGH | 368 | 10 | | 4736 |
| PSM | PDRYVILGGHR | 368 | 11 | | 4737 |
| PSM | PDSSWRGSLK | 315 | 10 | | 4738 |
| PSM | PFDCRDYA | 594 | 8 | | 4739 |
| PAP | PFRNCPRF | 157 | 8 | | 4740 |
| PSM | PFYRHVIY | 685 | 8 | | 4741 |
| PSM | PFYRHVIYA | 685 | 9 | | 4742 |
| PAP | PGCSPSCPLER | 345 | 11 | | 4743 |
| PSM | PGFTGNFSTQK | 331 | 11 | | 4744 |
| PSM | PGIYDALF | 706 | 8 | | 4745 |
| PSM | PGYPANEY | 270 | 8 | | 4746 |
| PSM | PGYPANEYA | 270 | 9 | | 4747 |
| PSM | PGYPANEYAY | 270 | 10 | | 4748 |
| PSM | PGYPANEYAYR | 270 | 11 | | 4749 |
| PAP | PIDTFPTDPIK | 49 | 11 | | 4750 |
| PSM | PIGYYDAQK | 296 | 9 | | 4751 |
| PAP | PIKESSWPQGF | 57 | 11 | | 4752 |
| PAP | PILLWQPIPVH | 134 | 11 | | 4753 |
| PSM | PLGLPDRPF | 678 | 9 | | 4754 |
| PSM | PLGLPDRPFY | 678 | 10 | | 4755 |
| PSM | PLGLPDRPFYR | 678 | 11 | | 4756 |
| PAP | PLLLARAA | 5 | 8 | | 4757 |
| PSM | PLMYSLVH | 468 | 8 | | 4758 |
| PAP | PLSEDQLLY | 147 | 9 | 0.0005 | 4759 |
| PSM | PLTPGYPA | 267 | 8 | | 4760 |
| PSM | PLTPGYPANEY | 267 | 11 | | 4761 |
| PAP | PLYCESVH | 212 | 8 | | 4762 |
| PAP | PLYCESVHNF | 212 | 10 | | 4763 |
| PSA | PLYDMSLLK | 95 | 9 | 0.2400 | 4764 |
| PSA | PLYDMSLLKNR | 95 | 11 | | 4765 |
| PSM | PLYHSVYETY | 550 | 10 | 0.0004 | 4766 |
| Kallikrein | PLYNMSLLK | 99 | 9 | | 4767 |
| Kallikrein | PLYNMSLLKH | 99 | 10 | | 4768 |
| PSM | PMFKYHLTVA | 568 | 10 | 0.0005 | 4769 |
| PAP | PSCPLERF | 349 | 8 | | 4770 |
| PAP | PSCPLERFA | 349 | 9 | | 4771 |
| PSM | PSIPVHPIGY | 290 | 10 | | 4772 |
| PSM | PSIPVHPIGYY | 290 | 11 | | 4773 |
| PSM | PSKAWGEVK | 721 | 9 | | 4774 |
| PSM | PSKAWGEVKR | 721 | 10 | 0.0003 | 4775 |
| PSA | PSLYTKVVH | 236 | 9 | | 4776 |
| PSA | PSLYTKVVHY | 236 | 10 | 0.0079 | 4777 |
| PSA | PSLYTKVVHYR | 236 | 11 | | 4778 |
| PSM | PSPEFSGMPR | 502 | 10 | | 4779 |
| PSM | PSSHNKYA | 694 | 8 | | 4780 |
| PAP | PSWATEDTMTK | 224 | 11 | | 4781 |
| PAP | PSYKKLIMY | 278 | 9 | 0.0002 | 4782 |
| PAP | PSYKKLIMYSA | 278 | 11 | | 4783 |
| PSM | PVHPIGYY | 293 | 8 | | 4784 |
| PSM | PVHPIGYYDA | 293 | 10 | | 4785 |
| Kallikrein | PVSHSFPH | 91 | 8 | | 4786 |
| Kallikrein | PVSHSFPHPLY | 91 | 11 | | 4787 |
| PSM | QAAAETLSEVA | 740 | 11 | | 4788 |
| PAP | QDLFGIWSK | 200 | 9 | 0.0006 | 4789 |
| PAP | QDLFGIWSKVY | 200 | 11 | | 4790 |
| PSM | QGMPEGDLVY | 167 | 10 | | 4791 |
| PAP | QIPSYKKLIMY | 276 | 11 | | 4792 |
| PSM | QIQSQWKEF | 95 | 9 | | 4793 |
| PSM | QIYVAAFTVQA | 731 | 11 | | 4794 |
| PSM | QLAGAKGVILY | 218 | 11 | | 4795 |
| PSM | QLAKQIQSQWK | 91 | 11 | | 4796 |
| PAP | QLGMEQHY | 72 | 8 | | 4797 |
| PAP | QLLYLPFR | 152 | 8 | | 4798 |
| PSM | QLMFLERA | 667 | 8 | | 4799 |
| PSM | QLMFLERAF | 667 | 9 | | 4800 |
| PAP | QLTQLGMEQH | 69 | 10 | | 4801 |
| PAP | QLTQLGMEQHY | 69 | 11 | | 4802 |
| PSM | QSGAAVVH | 389 | 8 | | 4803 |
| Kallikrein | QSLRPDEDSSH | 109 | 11 | | 4804 |
| Kallikrein | QVAVYSHGWA | 39 | 10 | | 4805 |
| Kallikrein | QVAVYSHGWAH | 39 | 11 | | 4806 |
| PSA | QVFQVSHSF | 84 | 9 | | 4807 |
| PSA | QVFQVSHSFPH | 84 | 11 | | 4808 |
| PSA | QVHPQKVTK | 182 | 9 | 0.0060 | 4809 |
| PSA | QVHPQKVTKF | 182 | 10 | | 4810 |
| PSA | QVLVASRGR | 35 | 9 | 0.0021 | 4811 |
| PSA | QVLVASRGRA | 35 | 10 | | 4812 |
| PSM | QVRGGMVF | 578 | 8 | | 4813 |
| PSM | QVRGGMVFELA | 578 | 11 | | 4814 |
| PSA | QVSHSFPH | 87 | 8 | | 4815 |
| PSA | QVSHSFPHPLY | 87 | 11 | | 4816 |
| Kallikrein | QVWLGRHNLF | 72 | 10 | | 4817 |
| PAP | QVYIRSTDVDR | 101 | 11 | | 4818 |
| PAP | RAAPLLLA | 2 | 8 | | 4819 |
| PAP | RAAPLLLAR | 2 | 9 | 0.1500 | 4820 |
| PAP | RAAPLLLARA | 2 | 10 | | 4821 |
| PAP | RAAPLLLARAA | 2 | 11 | | 4822 |
| PAP | RAASLSLGF | 10 | 9 | | 4823 |
| PAP | RAASLSLGFLF | 10 | 11 | | 4824 |
| PAP | RATQIPSY | 273 | 8 | | 4825 |
| PAP | RATQIPSYK | 273 | 9 | 0.0210 | 4826 |
| PAP | RATQIPSYKK | 273 | 10 | 0.0053 | 4827 |
| PSA | RAVCGGVLVH | 43 | 10 | 0.0110 | 4828 |
| Kallikrein | RAYSEKVTEF | 186 | 10 | | 4829 |
| PSM | RDMKINCSGK | 190 | 10 | 0.0021 | 4830 |
| PSM | RDYAVVLR | 598 | 8 | | 4831 |
| PSM | RDYAVVLRK | 598 | 9 | 0.0024 | 4832 |
| PSM | RDYAVVLRKY | 598 | 10 | | 4833 |
| PSM | RDYAVVLRKYA | 598 | 11 | | 4834 |
| PSA | RFLRPGDDSSH | 105 | 11 | | 4835 |
| PAP | RFQELESETLK | 163 | 11 | | 4836 |
| PSM | RGAVEPDR | 363 | 8 | | 4837 |
| PSM | RGAVEPDRY | 363 | 9 | | 4838 |
| PSM | RGGMVFELA | 580 | 9 | | 4839 |
| PSM | RGNILNLNGA | 255 | 10 | | 4840 |
| PSM | RGNKVKNA | 210 | 8 | | 4841 |
| PSM | RGNKVKNAQLA | 210 | 11 | | 4842 |
| PSM | RGSLKVPY | 320 | 8 | | 4843 |
| PSM | RGVAYINA | 445 | 8 | | 4844 |
| PSM | RISKLGSGNDF | 511 | 11 | | 4845 |
| Kallikrein | RIVGGWECEK | 24 | 10 | 0.0460 | 4846 |
| PSA | RIVGGWECEK | 20 | 10 | 0.0460 | 4847 |
| Kallikrein | RIVGGWEGEKH | 24 | 11 | | 4848 |
| PSA | RIVGGWECEKH | 20 | 11 | | 4849 |
| PSM | RIYNVIGTLR | 354 | 10 | 0.3700 | 4850 |
| PSM | RLGIASGR | 527 | 8 | | 4851 |
| PSM | RLGIASGRA | 527 | 9 | 0.0032 | 4852 |
| PSM | RLGIASGRAR | 527 | 10 | | 4853 |
| PSM | RLGIASGRARY | 527 | 11 | | 4854 |
| PAP | RLHPYKDF | 180 | 8 | | 4855 |
| PAP | RLHPYKDFIA | 180 | 10 | 0.0005 | 4856 |
| PSM | RLLQERGVA | 440 | 9 | 0.0012 | 4857 |
| PSM | RLLQERGVAY | 440 | 10 | 0.0220 | 4858 |
| PSA | RLSEPAELTDA | 121 | 11 | | 4859 |
| PSM | RMMNDQLMF | 662 | 9 | | 4860 |
| PSM | RSFGTLKK | 400 | 8 | | 4861 |
| Kallikrein | RSLQCVSLH | 169 | 9 | | 4862 |
| PAP | RSVLAKELK | 28 | 9 | 0.0490 | 4863 |
| PAP | RSVLAKELKP | 28 | 10 | | 4864 |
| PSM | RTEDFFKLER | 181 | 10 | | 4865 |
| PSM | RTILFASWDA | 414 | 10 | | 4866 |
| PAP | RTLMSAMTNLA | 111 | 11 | | 4867 |
| PSM | RVDCTPLMY | 463 | 9 | | 4868 |
| Kallikrein | RVPVSHSF | 89 | 8 | | 4869 |
| Kallikrein | RVPVSHSFPH | 89 | 10 | | 4870 |
| PAP | SAMTNLAA | 115 | 8 | | 4871 |
| PAP | SAMTNLAALF | 115 | 10 | | 4872 |
| PSM | SAPPDSSWR | 312 | 9 | 0.0006 | 4873 |
| PSM | SAVATARR | 10 | 8 | | 4874 |
| PSM | SAVATARRPR | 10 | 10 | | 4875 |
| PSM | SAVKNFTEIA | 634 | 10 | | 4876 |
| PAP | SCHLTELY | 312 | 8 | | 4877 |
| PAP | SCHLTELYF | 312 | 9 | | 4878 |
| PAP | SCHLTELYFEK | 312 | 11 | | 4879 |
| PAP | SCPLERFA | 350 | 8 | | 4880 |
| PSM | SDIVPPFSA | 155 | 9 | | 4881 |
| PSM | SDIVPPFSAF | 155 | 10 | | 4882 |
| PSM | SDPADYFA | 229 | 8 | | 4883 |
| PSM | SFDSLFSA | 628 | 8 | | 4884 |
| PSM | SFDSLFSAVK | 628 | 10 | | 4885 |
| PSM | SFGTLKKEGWR | 401 | 11 | | 4886 |
| PSM | SFPGIYDA | 704 | 8 | | 4887 |
| PSM | SFPGIYDALF | 704 | 10 | | 4888 |
| PSM | SGAAVVHEIVR | 390 | 11 | | 4889 |
| PSM | SGKIVIAR | 197 | 8 | | 4890 |
| PSM | SGKIVIARY | 197 | 9 | | 4891 |
| PSM | SGKIVIARYGK | 197 | 11 | | 4892 |
| PAP | SGLHGQDLF | 195 | 9 | | 4893 |
| PAP | SGLQMALDVY | 294 | 10 | | 4894 |
| PSM | SGMPRISK | 507 | 8 | | 4895 |
| PSM | SGNDFEVF | 517 | 8 | | 4896 |
| PSM | SGNDFEVFF | 517 | 9 | | 4897 |
| PSM | SGNDFEVFFQR | 517 | 11 | | 4898 |
| PSM | SGRARYTK | 532 | 8 | | 4899 |
| Kallikrein | SGWGSIEPEEF | 155 | 11 | | 4900 |
| PSA | SGWGSIEPEEF | 151 | 11 | | 4901 |
| PSM | SGYPLYHSVY | 547 | 10 | | 4902 |
| Kallikrein | SIALSVGCTGA | 7 | 11 | | 4903 |
| PSM | SIEGNYTLR | 455 | 9 | | 4904 |
| Kallikrein | SIEPEEFLR | 159 | 9 | | 4905 |
| Kallikrein | SIEPEEFLRPR | 159 | 11 | | 4906 |
| PSA | SIEPEEFLTPK | 155 | 11 | | 4907 |
| PSM | SIINEDGNEIF | 129 | 11 | | 4908 |
| PSM | SIPVHPIGY | 291 | 9 | | 4909 |
| PSM | SIPVHPIGYY | 291 | 10 | 0.0940 | 4910 |
| PSM | SISMKHPQEMK | 613 | 11 | | 4911 |
| PSM | SIVLPFDCR | 590 | 9 | 0.0006 | 4912 |
| PSM | SIVLPFDCRDY | 590 | 11 | | 4913 |
| PSM | SLFEPPPPGY | 142 | 10 | | 4914 |
| PSM | SLFSAVKNF | 631 | 9 | | 4915 |
| PAP | SLGFLFLLF | 15 | 9 | | 4916 |
| PAP | SLGFLFLLFF | 15 | 10 | | 4917 |
| Kallikrein | SLHLLSNDMCA | 175 | 11 | | 4918 |
| Kallikrein | SLLKHQSLR | 104 | 9 | | 4919 |
| PSA | SLLKNRFLR | 100 | 9 | 0.0024 | 4920 |
| PAP | SLLSLYGIH | 242 | 9 | 0.0006 | 4921 |
| PAP | SLLSLYGIHK | 242 | 10 | 0.4900 | 4922 |
| Kallikrein | SLQCVSL | 170 | 8 | | 4923 |
| Kallikrein | SLRPDEDSSH | 110 | 10 | | 4924 |
| PAP | SLSLGFLF | 13 | 8 | | 4925 |
| PAP | SLSLGFLFLLF | 13 | 11 | | 4926 |
| PSM | SLVHNLTK | 472 | 8 | | 4927 |
| PSM | SLVHNLTKELK | 472 | 11 | | 4928 |
| PSM | SLYESKVTK | 492 | 8 | | 4929 |
| PSM | SLYESWTKK | 492 | 9 | 1.0000 | 4930 |
| PAP | SLYGIHKQK | 245 | 9 | 1.1000 | 4931 |
| PAP | SLYGIHKQKEK | 245 | 11 | | 4932 |
| PSA | SLYTKVVH | 237 | 8 | | 4933 |
| PSA | SLYTKVVHY | 237 | 9 | 0.6800 | 4934 |
| PSA | SLYTKVVHYR | 237 | 10 | 0.2800 | 4935 |
| PSA | SLYTKVVHYRK | 237 | 11 | | 4936 |
| PSM | SMKHPQEMK | 615 | 9 | 0.1100 | 4937 |
| PSM | SMKHPQEMKTY | 615 | 11 | | 4938 |
| Kallikrein | SSHDLMLLR | 117 | 9 | 0.0039 | 4939 |
| PSA | SSHDLMLLR | 113 | 9 | 0.0039 | 4940 |
| PSM | SSHNKYAGESF | 695 | 11 | | 4941 |
| PSM | SSIEGNYTLR | 454 | 10 | 0.0007 | 4942 |
| PSM | SSNEATNITPK | 45 | 11 | | 4943 |
| PSM | SSWRGSLK | 317 | 8 | | 4944 |
| PSM | SSWRGSLKVPY | 317 | 11 | | 4945 |
| PAP | STDVDRTLMSA | 106 | 11 | | 4946 |
| PAP | STECMTTNSH | 369 | 10 | | 4947 |
| PSM | STEWAEENSR | 431 | 10 | 0.0005 | 4948 |
| PSM | STNEVTRIY | 348 | 9 | 0.0016 | 4949 |
| PSM | STQKVKMH | 338 | 8 | | 4950 |
| PSM | STQKVKMHIH | 338 | 10 | | 4951 |
| PAP | SVHNFTLPSWA | 217 | 11 | | 4952 |
| PSA | SVILLGRH | 67 | 8 | | 4953 |
| PSA | SVILLGRHSLF | 67 | 11 | | 4954 |
| PAP | SVLAKELK | 29 | 8 | 0.0017 | 4955 |
| PAP | SVLAKELKF | 29 | 9 | | 4956 |
| PSM | SVSFDSLF | 626 | 8 | | 4957 |
| PSM | SVSFDSLFSA | 626 | 10 | | 4958 |
| PSA | SVTWIGAA | 7 | 8 | | 4959 |
| PSM | SVYETYELVEK | 554 | 11 | | 4960 |
| PSA | TAAHCIRNK | 58 | 9 | 0.0094 | 4961 |
| Kallikrein | TAAHCLKK | 62 | 8 | | 4962 |
| PSM | TARRPRWLCA | 14 | 10 | | 4963 |
| PSM | TDSAVATA | 8 | 8 | | 4964 |
| PSM | TDSAVATAR | 8 | 9 | | 4965 |
| PSM | TDSAVATARR | 8 | 10 | | 4966 |
| PAP | TDVDRTLMSA | 107 | 10 | | 4967 |
| PAP | TFPTDPIK | 52 | 8 | | 4968 |
| Kallikrein | TGAVPLIQSR | 15 | 10 | | 4969 |
| PSM | TGNFSTQK | 334 | 8 | | 4970 |
| PSM | TGNFSTQKVK | 334 | 10 | 0.0007 | 4971 |
| Kallikrein | TGQRVPVSH | 86 | 9 | | 4972 |
| Kallikrein | TGQRVPVSHSF | 86 | 11 | | 4973 |
| PSA | TGQVFQVSH | 82 | 9 | 0.0002 | 4974 |
| PSA | TGQVFQVSHSF | 82 | 11 | | 4975 |
| PSM | TILFASWDA | 415 | 9 | | 4976 |
| PAP | TLGKLSGLH | 190 | 9 | | 4977 |
| PSM | TLKKEGWR | 404 | 8 | | 4978 |
| PSM | TLKKEGWRPR | 404 | 10 | 0.0007 | 4979 |
| PSM | TLKKEGWRPRR | 404 | 11 | | 4980 |
| PAP | TLKSEEFQK | 171 | 9 | 0.0006 | 4981 |
| PAP | TLKSEEFQKR | 171 | 10 | 0.0007 | 4982 |
| PAP | TLMSAMTNLA | 112 | 10 | 0.0005 | 4983 |
| PAP | TLMSAMTNLAA | 112 | 11 | | 4984 |
| PSM | TLRGAVEPDR | 361 | 10 | 0.0003 | 4985 |
| PSM | TLRGAVEPDRY | 361 | 11 | | 4986 |
| PSM | TLRVDCTPLMY | 461 | 11 | | 4987 |
| PSA | TLSVTWIGA | 5 | 9 | | 4988 |
| PSA | TLSVTWIGAA | 5 | 10 | | 4989 |
| PAP | TLVFRHGDR | 39 | 9 | 0.0006 | 4990 |
| PSM | TSLFEPPPPGY | 141 | 11 | | 4991 |
| Kallikrein | TSWGPEPCA | 227 | 9 | | 4992 |
| PSA | TSWGSEPCA | 223 | 9 | | 4993 |
| PAP | TTVSGLQMA | 291 | 9 | | 4994 |
| PSM | TVAQVRGGMVF | 575 | 11 | | 4995 |
| PAP | TVPLSEDQLLY | 145 | 11 | | 4996 |
| PAP | TVSGLQMA | 292 | 8 | | 4997 |
| PSM | VAAFTVQA | 734 | 8 | | 4998 |
| PSM | VAAFTVQAA | 734 | 9 | | 4999 |
| PSM | VAAFTVQAAA | 734 | 10 | | 5000 |
| PSM | VAQVRGGMVF | 576 | 10 | | 5001 |
| PSM | VATARRPR | 12 | 8 | | 5002 |
| Kallikrein | VAVYSHGWA | 40 | 9 | | 5003 |
| Kallikrein | VAVYSHGWAH | 40 | 10 | | 5004 |
| PSA | VCAQVHPQK | 179 | 9 | | 5005 |
| PSA | VCGGVLVH | 45 | 8 | | 5006 |
| PSM | VDCTPLMY | 464 | 8 | | 5007 |
| PSM | VDPSKAWGEVK | 719 | 11 | | 5008 |
| PAP | VDRTLMSA | 109 | 8 | | 5009 |
| PSM | VFFQRLGIA | 523 | 9 | | 5010 |
| PSM | VFGGIDPQSGA | 382 | 11 | | 5011 |
| PSA | VFQVSHSF | 85 | 8 | | 5012 |
| PSA | VFQVSHSFPH | 85 | 10 | | 5013 |
| PSM | VFRGNKVK | 208 | 8 | | 5014 |
| PSM | VFRGNKVKNA | 208 | 10 | | 5015 |
| Kallikrein | VGGWECEK | 26 | 8 | | 5016 |
| PSA | VGGWECEK | 22 | 8 | | 5017 |
| Kallikrein | VGGWECEKH | 26 | 9 | | 5018 |
| PSA | VGGWECEKH | 22 | 9 | | 5019 |
| PSM | VGLPSIPVH | 287 | 9 | | 5020 |
| PSM | VGPGFTGNF | 329 | 9 | | 5021 |
| PSM | VIARYGKVF | 201 | 9 | | 5022 |
| PSM | VIARYGKVFR | 201 | 10 | | 5023 |
| PSM | VIGTLRGA | 358 | 8 | | 5024 |
| PSA | VILLGRHSLF | 68 | 10 | | 5025 |
| PSA | VILLGRHSLFH | 68 | 11 | | 5026 |
| PSM | VILYSDPA | 225 | 8 | | 5027 |
| PSM | VILYSDPADY | 225 | 10 | | 5028 |
| PSM | VILYSDPADYF | 225 | 11 | | 5029 |
| PSA | VISNDVCA | 174 | 8 | | 5030 |
| PSA | VISNDVCAQVH | 174 | 11 | | 5031 |
| PSM | VIYAPSSH | 690 | 8 | | 5032 |
| PSM | VIYAPSSHNK | 690 | 10 | 0.5400 | 5033 |
| PSM | VIYAPSSHNKY | 690 | 11 | | 5034 |
| PSM | VLAGGFFLLGF | 27 | 11 | 5035 | |
| PAP | VLAKELKF | 30 | 8 | | 5036 |
| Kallikrein | VLGLPTQEPA | 138 | 10 | | 5037 |
| PSM | VLLSYPNK | 115 | 8 | | 5038 |
| PSM | VLLSYPNKTH | 115 | 10 | | 5039 |
| PSM | VLPFDCRDY | 592 | 9 | | 5040 |
| PSM | VLPFDCRDYA | 592 | 10 | 0.0005 | 5041 |
| PSM | VLRKYADK | 603 | 8 | | 5042 |
| PSM | VLRKYADKIY | 603 | 10 | | 5043 |
| PSM | VLRMMNDQLMF | 660 | 11 | | 5044 |
| PSA | VLTAAHCIR | 56 | 9 | 0.0002 | 5045 |
| PSA | VLTAAHCIRNK | 56 | 11 | | 5046 |
| Kallikrein | VLTAAHCLK | 60 | 9 | | 5047 |
| Kallikrein | VLTAAHCLKK | 60 | 10 | | 5048 |
| PSA | VLVASRGR | 36 | 8 | | 5049 |
| PSA | VLVASRGRA | 36 | 9 | | 5050 |
| Kallikrein | VLVHPQWVLTA | 53 | 11 | | 5051 |
| PSA | VLVHPQWVLTA | 49 | 11 | | 5052 |
| PAP | VLVNEILNH | 262 | 9 | 0.0019 | 5053 |
| PAP | VLVNEILNHMK | 262 | 11 | | 5054 |
| PSA | VMDLPTQEPA | 134 | 10 | | 5055 |
| PSM | VSDIVPPF | 154 | 8 | | 5056 |
| PSM | VSDIVPPFSA | 154 | 10 | | 5057 |
| PSM | VSDIVPPFSAF | 154 | 11 | | 5058 |
| PSM | VSFDSLFSA | 627 | 9 | | 5059 |
| PSM | VSFDSLFSAVK | 627 | 11 | | 5060 |
| PAP | VSGLQMALDVY | 293 | 11 | | 5061 |
| Kallikrein | VSHSFPHPLY | 92 | 10 | 0.0003 | 5062 |
| PSA | VSHSFPEIPLY | 88 | 10 | 0.0003 | 5063 |
| Kallikrein | VTEFMLCA | 192 | 8 | | 5064 |
| PSA | VTKFMLCA | 188 | 8 | | 5065 |
| PSA | VTKFMLCAGR | 188 | 10 | 0.0003 | 5066 |
| PAP | VTLVFRHGDR | 38 | 10 | | 5067 |
| PSM | VVHEIVRSF | 394 | 9 | | 5068 |
| Kallikrein | VVHYRKWIK | 246 | 9 | 0.0072 | 5069 |
| PSA | VVHYRKWIK | 242 | 9 | 0.0072 | 5070 |
| PSM | VVLRKYADK | 602 | 9 | 0.0390 | 5071 |
| PSM | VVLRKYADKIY | 602 | 11 | | 5072 |
| Kallikrein | WAHCGGVLVH | 47 | 10 | | 5073 |
| PAP | WATEDTMTK | 226 | 9 | 0.0006 | 5074 |
| PAP | WATEDTMTKLR | 226 | 11 | | 5075 |
| Kallikrein | WDLVLSIA | 2 | 8 | | 5076 |
| PSM | WFIKSSNEA | 41 | 9 | | 5077 |
| PSM | WGEVKRQIY | 725 | 9 | | 5078 |
| PSM | WGEVKRQIYVA | 725 | 11 | | 5079 |
| Kallikrein | WGPEPCALPEK | 229 | 11 | | 5080 |
| PSA | WGSEPCALPER | 225 | 11 | | 5081 |
| Kallikrein | WGSIEPEEF | 157 | 9 | | 5082 |
| PSA | WGSIEPEEF | 153 | 9 | | 5083 |
| Kallikrein | WGSIEPEEFLR | 157 | 11 | | 5084 |
| PSA | WIGAAPLILSR | 10 | 11 | | 5085 |
| Kallikrein | WIKDTIAA | 252 | 8 | | 5086 |
| PSA | WIKDTIVA | 248 | 8 | | 5087 |
| PSM | WLCAGALVLA | 20 | 10 | 0.0026 | 5088 |
| PAP | WLDRSVLA | 25 | 8 | | 5089 |
| PAP | WLDRSVLAK | 25 | 9 | 0.0035 | 5090 |
| Kallikrein | WLGRHNLF | 74 | 8 | | 5091 |
| PAP | WSKVYDPLY | 206 | 9 | 0.0002 | 5092 |
| PAP | WSTECMTTNSH | 368 | 11 | | 5093 |
| PSM | WTKKSPSPEF | 497 | 10 | | 5094 |
| PSA | WVLTAAHCIR | 55 | 10 | 0.0004 | 5095 |
| Kallikrein | WVLTAAHCLK | 59 | 10 | | 509.6 |
| Kallikrein | WVLTAAHCLKK | 59 | 11 | | 5097 |
| PSM | YADKIYSISMK | 607 | 11 | | 5098 |
| PSM | YAGESFPGIY | 700 | 10 | | 5099 |
| PSM | YAPSSHNK | 692 | 8 | | 5100 |
| PSM | YAPSSHNKY | 692 | 9 | | 5101 |
| PSM | YAPSSHNKYA | 692 | 10 | | 5102 |
| PSM | YARTEDFF | 179 | 8 | | 5103 |
| PSM | YARTEDFFK | 179 | 9 | | 5104 |
| PAP | YASCHLTELY | 310 | 10 | 0.0003 | 5105 |
| PAP | YASCHLTELYF | 310 | 11 | | 5106 |
| PSM | YAVVLRKY | 600 | 8 | | 5107 |
| PSM | YAVVLRKYA | 600 | 9 | | 5108 |
| PSM | YAVVLRKYADK | 600 | 11 | | 5109 |
| PSM | YAYRRGIA | 277 | 8 | | 5110 |
| PSM | YAYRRGIAEA | 277 | 10 | | 5111 |
| PAP | YCESVHNF | 214 | 8 | | 5112 |
| PSM | YDALFDIESK | 709 | 10 | | 5113 |
| PSM | YDAQKLLEK | 300 | 9 | 0.0006 | 5114 |
| PSA | YDMSLLKNR | 97 | 9 | | 5115 |
| PSA | YDMSLLKNRF | 97 | 10 | | 5116 |
| PAP | YDPLYCESVH | 210 | 10 | | 5117 |
| PSM | YDPMFKYH | 566 | 8 | | 5118 |
| PSM | YDVLLSYPNK | 113 | 10 | 0.0005 | 5119 |
| PSM | YFAPGVKSY | 234 | 9 | | 5120 |
| PAP | YFEKGEYF | 319 | 8 | | 5121 |
| PAP | YFVEMYYR | 325 | 8 | | 5122 |
| PAP | YGIHKQKEK | 247 | 9 | 0.0006 | 5123 |
| PAP | YGIHKQKEKSR | 247 | 11 | | 5124 |
| PSM | YGKVFRGNK | 205 | 9 | 0.0006 | 5125 |
| PSM | YGKVFRGNKVK | 205 | 1.1 | | 5126 |
| PAP | YIRKRYRK | 84 | 8 | | 5127 |
| PAP | YTRKRYRKF | 84 | 9 | | 5128 |
| PAP | YIRSTDVDR | 103 | 9 | | 5129 |
| PAP | YLPFRNCPR | 155 | 9 | | 5130 |
| PAP | YLPFRNCPRF | 155 | 10 | | 5131 |
| PSM | YSDPADYF | 228 | 8 | | 5132 |
| PSM | YSDPADYFA | 228 | 9 | | 5133 |
| Kallikrein | YSEKVTEF | 188 | 8 | | 5134 |
| PSM | YSLVHNLTK | 471 | 9 | 0.0600 | 5135 |
| PSM | YSVSFDSLF | 625 | 9 | | 5136 |
| PSM | YSVSFDSLFSA | 625 | 11 | | 5137 |
| PSM | YTKNWETNK | 537 | 9 | | 5138 |
| PSM | YTKNWETNKF | 537 | 10 | | 5139 |
| Kallikrein | YTKVVHYR | 243 | 8 | | 5140 |
| PSA | YTKVVHYR | 239 | 8 | | 5141 |
| Kallikrein | YTKVVHYRK | 243 | 9 | 0.0006 | 5142 |
| PSA | YTKVVHYRK | 239 | 9 | 0.0006 | 5143 |
| PSM | YVAAFTVQA | 733 | 9 | | 5144 |
| PSM | YVAAFTVQAA | 733 | 10 | | 5145 |
| PSM | YVAAFTVQAAA | 733 | 11 | | 5146 |
| PSM | YVILGGHR | 371 | 8 | | 5147 |
| PSM | YVNYARTEDF | 176 | 10 | | 5148 |
| PSM | YVNYARTEDFF | 176 | 11 | | 5149 |

[0450] TABLE XVII
Prostate All Motif PeDtides with Binding Data

| | | | | | |
|---|---|---|---|---|---|
| | | | No. of | | Seq. |
| | | | Amino | | Id. |
| Protein | Sequence | Position | Acids | A*1101 | no. |

| | | | | | |
|---|---|---|---|---|---|
| PSA | AAHCIRNK | 59 | 8 | | 5150 |
| PSA | AAPLILSR | 13 | 8 | | 5151 |
| PAP | AAPLLLAR | 3 | 8 | | 5152 |
| PSM | AAVVHEIVR | 392 | 9 | | 5153 |
| PSM | ADKIYSISMK | 608 | 10 | | 5154 |
| PSM | ADKIYSISMKH | 608 | 11 | | 5155 |
| PSM | ADSSIEGNY | 452 | 9 | | 5156 |
| PSM | ADYFAPGVK | 232 | 9 | 0.0051 | 5157 |
| PSM | ADYFAPGVKSY | 232 | 11 | | 5158 |
| PSM | AFIDPLGLPDR | 674 | 11 | | 5159 |
| PSM | AGAKGVILY | 220 | 9 | | 5160 |
| PSM | AGDPLTPGY | 264 | 9 | | 5161 |
| PSM | AGESFPGIY | 701 | 9 | | 5162 |
| Kallikrein | AGLWTGGK | 199 | 8 | | 5163 |
| PSA | AGRWTGGK | 195 | 8 | | 5164 |
| PSM | AGTEQNFQLAK | 84 | 11 | | 5165 |
| PSM | ALFDIESK | 711 | 8 | | 5166 |
| Kallikrein | ALPEKPAVY | 235 | 9 | | 5167 |
| Kallikrein | ALPEKPAVYTK | 235 | 11 | | 5168 |
| PSA | ALPERPSLY | 231 | 9 | 0.0013 | 5169 |
| PSA | ALPERPSLYTK | 231 | II | | 5170 |
| PSM | ANEYAYRR | 274 | 8 | | 5171 |
| PSM | ANSIVLPFDCR | 588 | 11 | | 5172 |
| PAP | ASCHLTELY | 311 | 9 | 0.0550 | 5173 |
| PSM | ASGRARYTK | 531 | 9 | 0.2700 | 5174 |
| PAP | ATEDTMTK | 227 | 8 | 0.0039 | 5175 |
| PAP | ATEDTMTKLR | 227 | 10 | | 5176 |
| PAP | ATLGKLSGLH | 189 | 10 | | 5177 |
| PSM | ATNITPKH | 49 | 8 | | 5178 |
| PSM | ATNITPKHNMK | 49 | 11 | | 5179 |
| PAP | ATQIPSYK | 274 | 8 | 0.0700 | 5180 |
| PAP | ATQIPSYKK | 274 | 9 | 1.2000 | 5181 |
| PSM | AVATARRPR | 11 | 9 | | 5182 |
| PSA | AVCGGVLVH | 44 | 9 | | 5183 |
| PSM | AVGLPSIPVH | 286 | 10 | | 5184 |
| PSM | AVKNFTEIASK | 635 | 11 | | 5185 |
| Kallikrein | AVPLIQSR | 17 | 8 | | 5186 |
| PSM | AVVHEIVR | 393 | 8 | | 5187 |
| PSM | AVVLRKYADK | 601 | 10 | 0.0210 | 5188 |
| Kallikrein | AVYSHGWAH | 41 | 9 | | 5189 |
| Kallikrein | AVYTKVVH | 241 | 8 | | 5190 |
| Kallikrein | AVYTKVVHY | 241 | 9 | | 5191 |
| Kallikrein | AVYTKVVHYR | 241 | 10 | | 5192 |
| Kallikrein | AVYTKVVHYRK | 241 | 11 | | 5193 |
| Kallikrein | CAGLWTGGK | 198 | 9 | | 5194 |
| PSA | CAGRWTGGK | 194 | 9 | 0.0015 | 5195 |
| Kallikrein | CALPEKPAVY | 234 | 10 | | 5196 |
| PSA | CALPERPSLY | 230 | 10 | | 5197 |
| PSA | CAQVHPQK | 180 | 8 | | 5198 |
| PSA | CAQVHPQKVTK | 180 | 11 | | 5199 |
| Kallikrein | CARAYSEK | 184 | 8 | | 5200 |
| PSM | CSGKIVIAR | 196 | 9 | | 5201 |
| PSM | CSGKIVIARY | 196 | 10 | 0.0490 | 5202 |
| PAP | CSPSCPLER | 347 | 9 | 0.0006 | 5203 |
| Kallikrein | CTGAVPLIQSR | 14 | 11 | | 5204 |
| PSM | CTPLMYSLVH | 466 | 10 | | 5205 |
| PSM | DALFDIESK | 710 | 9 | 0.0002 | 5206 |
| PSM | DAQKLLEK | 301 | 8 | | 5207 |
| PSM | DCRDYAVVLR | 596 | 10 | | 5208 |
| PSM | DCRDYAVVLRK | 596 | 11 | | 5209 |
| PSM | DCTPLMYSLVH | 465 | 11 | | 5210 |
| PSA | DDSSHDLMLLR | 111 | 11 | | 5211 |
| PSM | DFDKSNPIVLR | 652 | 11 | | 5212 |
| PSM | DFEVFFQR | 520 | 8 | | 5213 |
| PSM | DFFKLERDMK | 184 | 10 | | 5214 |
| PAP | DFIATLGK | 186 | 8 | | 5215 |
| PSM | DIESKVDPSK | 714 | 10 | 0.0002 | 5216 |
| PAP | DLFGIWSK | 201 | 8 | | 5217 |
| PAP | DLFGIWSKVY | 201 | 10 | | 5218 |
| PSM | DLVYVNYAR | 173 | 9 | | 5219 |
| Kallikrein | DMCARAYSEK | 182 | 10 | | 5220 |
| PSM | DMKINCSGK | 191 | 9 | | 5221 |
| PSA | DMSLLKNR | 98 | 8 | 0.0001 | 5222 |
| PSA | DMSLLKNRFLR | 98 | 11 | | 5223 |
| PSM | DSAVATAR | 9 | 8 | | 5224 |
| PSM | DSAVATARR | 9 | 9 | | 5225 |
| PSM | DSAVATARRPR | 9 | 11 | | 5226 |
| PSM | DSLFSAVK | 630 | 8 | | 5227 |
| Kallikrein | DSSHDLMLLR | 116 | 10 | | 5228 |
| PSA | DSSHDLMLLR | 112 | 10 | | 5229 |
| PSM | DSSIEGNY | 453 | 8 | | 5230 |
| PSM | DSSIEGNYTLR | 453 | 11 | | 5231 |
| PSM | DSSWRGSLK | 316 | 9 | 0.0003 | 5232 |
| PSM | DSVELAHY | 106 | 8 | | 5233 |
| PAP | DTFPTDPIK | 51 | 9 | 0.0001 | 5234 |
| Kallikrein | DTGQRVPVSH | 85 | 10 | | 5235 |
| PSA | DTGQVFQVSH | 81 | 10 | | 5236 |
| PSA | DVCAQVHPQK | 178 | 10 | 0.0011 | 5237 |
| PSM | DVLLSYPNK | 114 | 9 | 0.0010 | 5238 |
| PSM | DVLLSYPNKTH | 114 | 11 | | 5239 |
| PAP | DVYNGLLPPY | 301 | 10 | | 5240 |
| PSM | EATNITPK | 48 | 8 | | 5241 |
| PSM | EATNITPKH | 48 | 9 | | 5242 |
| PSM | EAVGLPSIPVH | 285 | 11 | | 5243 |
| PAP | ECMTTNSH | 371 | 8 | | 5244 |
| PSM | EDFFKLER | 183 | 8 | | 5245 |
| PSM | EDFFKLERDMK | 183 | 11 | | 5246 |
| PAP | EDQLLYLPFR | 150 | 10 | | 5247 |
| Kallikrein | EDSSHDLMLLR | 115 | 11 | | 5248 |
| Kallikrein | EDTGQRVPVSH | 84 | 11 | | 5249 |
| PSA | EDTGQVFQVSH | 80 | 11 | | 5250 |
| PAP | EDTMTKLR | 229 | 8 | | 5251 |
| PSM | EFGLDSVELAH | 102 | 11 | | 5252 |
| PAP | EFQKRLHPY | 176 | 9 | | 5253 |
| PAP | EFQKRLHPYK | 176 | 10 | | 5254 |
| PSM | EFSGMPRISK | 505 | 10 | | 5255 |
| PSM | EGDLVYVNY | 171 | 9 | | 5256 |
| PSM | EGDLVYVNYAR | 171 | 11 | | 5257 |
| PSM | EGFEGKSLY | 486 | 9 | | 5258 |
| PSM | EGKSLYESWTK | 489 | 11 | | 5259 |
| PSM | EIASKFSER | 641 | 9 | 0.0002 | 5260 |
| PAP | EILNHMKR | 266 | 8 | | 5261 |
| PSM | EIVRSFGTLK | 397 | 10 | | 5262 |
| PSM | EIVRSFGTLKK | 397 | 11 | | 5263 |
| PSM | ELAHYDVLLSY | 109 | 11 | | 5264 |
| PAP | ELESETLK | 166 | 8 | | 5265 |
| PAP | ELGEYIRK | 80 | 8 | | 5266 |
| PAP | ELGEYIRKR | 80 | 9 | | 5267 |
| PAP | ELGEYIRKRY | 80 | 10 | | 5268 |
| PAP | ELGEYIRKRYR | 80 | 11 | | 5269 |
| PSM | ELKAENIK | 64 | 8 | | 5270 |
| PSM | ELKAENIKK | 64 | 9 | | 5271 |
| PAP | ELKFVTLVFR | 34 | 10 | 0.0037 | 5272 |
| PAP | ELKFYTLVFRH | 34 | 11 | | 5273 |
| PAP | ELSELSLLSLY | 237 | 11 | | 5274 |
| PAP | ELSLLSLY | 240 | 8 | | 5275 |
| PAP | ELSLLSLYGIH | 240 | 11 | | 5276 |
| PAP | ELYFEKGEY | 317 | 9 | | 5277 |
| PAP | EMYYRNETQH | 328 | 10 | | 5278 |
| PSM | ENIKKYLY | 68 | 8 | | 5279 |
| PSM | ENSRLLQER | 437 | 9 | | 5280 |
| PSM | ESKVDPSK | 716 | 8 | | 5281 |
| PAP | ESYKHEQVY | 95 | 9 | 0.0002 | 5282 |
| PAP | ESYKHEQVYIR | 95 | 11 | | 5283 |
| PSM | ETDSAVATAR | 7 | 10 | | 5284 |
| PSM | ETDSAVATARR | 7 | 11 | | 5285 |
| PAP | ETLKSEEFQK | 170 | 10 | 0.0140 | 5286 |
| PAP | ETLKSEEFQKR | 170 | 11 | | 5287 |
| PSM | ETNKFSGY | 542 | 8 | | 5288 |
| PSM | ETNKFSGYPLY | 542 | 11 | | 5289 |
| PSM | ETYELVEK | 557 | 8 | | 5290 |
| PSM | ETYELVEKFY | 557 | 10 | 0.0002 | 5291 |
| PSM | FAPGVKSY | 235 | 8 | | 5292 |
| PSM | FDCRDYAVVLR | 595 | 11 | | 5293 |
| PSM | FDIESKVDPSK | 713 | 11 | | 5294 |
| PSM | FDKSNPIVLR | 653 | 10 | | 5295 |
| PSM | FDSLFSAVK | 629 | 9 | | 5296 |
| PSM | FFKLERDMK | 185 | 9 | | 5297 |
| PSM | FFQRLGIASGR | 524 | 11 | | 5298 |
| PAP | FFWLDRSVLAK | 23 | 11 | | 5299 |
| PAP | FGIWSKVY | 203 | 8 | | 5300 |
| PSM | FGLDSVELAH | 103 | 10 | | 5301 |
| PSM | FGLDSVELAHY | 103 | 11 | | 5302 |
| PSM | FGTLKKEGWR | 402 | 10 | | 5303 |
| PSM | FIDPLGLPDR | 675 | 10 | | 5304 |
| PSM | FLDELKAENIK | 61 | 11 | | 5305 |
| PSM | FLFGWFIK | 37 | 8 | | 5306 |
| PAP | FLFLLFFWLDR | 18 | 11 | | 5307 |
| PAP | FLLFFWLDR | 20 | 9 | 0.0004 | 5308 |
| PAP | FLNESYKH | 92 | 8 | | 5309 |
| PSA | FLRPGDDSSH | 106 | 10 | | 5310 |
| PSM | FLYNFTQIPH | 73 | 10 | 0.0036 | 5311 |
| PSM | FSERLQDFDK | 646 | 10 | 0.0007 | 5312 |
| PSM | FSGMPRISK | 506 | 9 | | 5313 |
| PSM | FSGYPLYH | 546 | 8 | | 5314 |
| PSM | FSGYPLYHSVY | 546 | 11 | | 5315 |
| PSM | FSTQKVKMH | 337 | 9 | | 5316 |
| PSM | FSTQKVKMHIH | 337 | 11 | | 5317 |
| PSM | FTEIASKFSER | 639 | 11 | | 5318 |
| PSM | FTGNFSTQK | 333 | 9 | | 5319 |
| PSM | FTGNFSTQKVK | 333 | 11 | | 5320 |
| PAP | FVTLVFRH | 37 | 8 | | 5321 |
| PAP | FVTLVFRHGDR | 37 | 11 | | 5322 |
| PSA | GAAPLILSR | 12 | 9 | 0.0350 | 5323 |
| PSM | GAAVVHEIVR | 391 | 10 | | 5324 |
| PSM | GAGDPLTPGY | 263 | 10 | | 5325 |
| PSM | GAKGVILY | 221 | 8 | | 5326 |
| PSM | GAVEPDRY | 364 | 8 | | 5327 |
| Kallikrein | GAVPLIQSR | 16 | 9 | | 5328 |
| PAP | GCSPSCPLER | 346 | 10 | | 5329 |
| PSM | GDLVYVNY | 172 | 8 | | 5330 |
| PSM | GDLVYVNYAR | 172 | 10 | | 5331 |
| PSM | GDPLTPGY | 265 | 8 | | 5332 |
| PSM | GFEGKSLY | 487 | 8 | | 5333 |
| PSM | GFLFGWFIK | 36 | 9 | 0.0014 | 5334 |
| PSM | GFTGNFSTQK | 332 | 10 | | 5335 |
| PSM | GGSAPPDSSWR | 310 | 11 | | 5336 |
| PAP | GGVLVNEILNH | 260 | 11 | | 5337 |
| Kallikrein | GGWECEKH | 27 | 8 | | 5338 |
| PSA | GGWECEKH | 23 | 8 | | 5339 |
| PSM | GIASGRAR | 529 | 8 | | 5340 |
| PSM | GIASGRARY | 529 | 9 | | 5341 |
| PSM | GIASGRARYTK | 529 | 11 | | 5342 |
| PAP | GIHKQKEK | 248 | 8 | | 5343 |
| PAP | GIHKQKEKSR | 248 | 10 | | 5344 |
| PAP | GIWSKVYDPLY | 204 | 11 | | 5345 |
| PSM | GLDSVELAH | 104 | 9 | | 5346 |
| PSM | GLDSVELAHY | 104 | 10 | | 5347 |
| PAP | GLLPPYASGH | 305 | 10 | | 5348 |
| PSM | GLPDRPFY | 680 | 8 | | 5349 |
| PSM | GLPDRPFYR | 680 | 9 | 0.0280 | 5350 |
| PSM | GLPDRPFYRH | 680 | 10 | | 5351 |
| PSM | GLPSIPVH | 288 | 8 | | 5352 |
| PAP | GLQMALDVY | 295 | 9 | | 5353 |
| PAP | GMEQHYELGEY | 74 | 11 | | 5354 |
| PSM | GMPEGDLVY | 168 | 9 | 0.0002 | 5355 |
| PSM | GNDFEVFFQR | 518 | 10 | | 5356 |
| PSM | GNFSTQKVK | 335 | 9 | | 5357 |
| PSM | GNFSTQKVKMH | 335 | 11 | | 5358 |
| PSM | GSAPPDSSWR | 311 | 10 | 0.1400 | 5359 |
| PSA | GSEPALPER | 226 | 10 | | 5360 |
| Kallikrein | GSIEPEEFLR | 158 | 10 | | 5361 |
| PSM | GSTEWAEENSR | 430 | 11 | | 5362 |
| PSM | GTEQNFQLAK | 85 | 10 | | 5363 |
| PSM | GTLKKEGWR | 403 | 9 | | 5364 |
| PSM | GTLKKEGWRPR | 403 | 11 | | 5365 |
| PSM | GTLRGAVEPDR | 360 | 11 | | 5366 |
| PSM | GVILYSDPADY | 224 | 11 | | 5367 |
| PAP | GVLVNEILNH | 261 | 10 | | 5368 |
| Kallikrein | HCGGVLVH | 49 | 8 | | 5369 |
| PAP | HGQDLFGIWSK | 198 | 11 | | 5370 |
| PSM | HIHSTNEVTR | 345 | 10 | | 5371 |
| Kallikrein | HLLSNDMCAR | 177 | 10 | | 53.72 |
| PAP | HLTELYFEK | 314 | 9 | 0.5300 | 5373 |
| PSM | HLTVAQVR | 573 | 8 | | 5374 |
| PAP | HMKRATQIPSY | 270 | 11 | | 5375 |
| PSM | HNLTKELK | 475 | 8 | | 5376 |
| PSM | HNMKAFLDELK | 56 | 11 | | 5377 |
| Kallikrein | HSFPHPLY | 94 | 8 | 0.0006 | 5378 |
| PSA | HSFPHPLY | 90 | 8 | 0.0006 | 5379 |
| Kallikrein | HSQPWQVAVY | 34 | 10 | | 5380 |
| PSM | HSTNEVTR | 347 | 8 | | 5381 |
| PSM | HSTNEVTRIY | 347 | 10 | 0.0002 | 5382 |
| PSM | HVIYAPSSH | 689 | 9 | | 5383 |
| PSM | HVIYAPSSHNK | 689 | 11 | | 5384 |
| PSM | IARYGKVFR | 202 | 9 | | 5385 |
| PSM | IASGRARY | 530 | 8 | | 5386 |
| PSM | IASGRARYTK | 530 | 10 | | 5387 |
| PSM | IASKFSER | 642 | 8 | | 5388 |
| PAP | IATLGKLSGLH | 188 | 11 | | 5389 |
| PSM | IDPLGLPDR | 676 | 9 | | 5390 |
| PSM | IDPQSGAAVVH | 386 | 11 | | 5391 |
| PAP | IDTFPTDPIK | 50 | 10 | | 5392 |
| PSA | IGAAPLILSR | 11 | 10 | | 5393 |
| PSM | IGYYDAQK | 297 | 8 | | 5394 |
| PSA | ILLGRHSLFH | 69 | 10 | | 5395 |
| PAP | ILLWQPIPVH | 135 | 10 | | 5396 |
| PSM | ILYSDPADY | 226 | 9 | | 5397 |
| PSM | INADSSIEGNY | 450 | 11 | | 5398 |
| PSM | INCSGKIVIAR | 194 | 11 | | 5399 |
| PSM | ISMKHPQEMK | 614 | 10 | 0.1100 | 5400 |
| PSA | ISNDVCAQVH | 175 | 10 | | 5401 |
| PSM | ITPKHNMK | 52 | 8 | | 5402 |
| Kallikrein | IVGGWECEK | 25 | 9 | 0.0190 | 5403 |
| PSA | IVGGWECEK | 21 | 9 | 0.0190 | 5404 |
| Kallikrein | IVGGWECEKH | 25 | 10 | | 5405 |
| PSA | IVGGWECEKH | 21 | 10 | | 5406 |
| PSM | IVIARYGK | 200 | 8 | | 5407 |
| PSM | IVIARYGKVFR | 200 | 11 | | 5408 |
| PSM | IVLPFDCR | 591 | 8 | | 5409 |
| PSM | IVLPFDCRDY | 591 | 10 | | 5410 |
| PSM | IVRSFGTLK | 398 | 9 | 0.0087 | 5411 |
| PSM | IVRSFGTLKK | 398 | 10 | 0.0006 | 5412 |
| PSM | KAENIKKFLY | 66 | 10 | | 5413 |
| PSM | KAFLDELK | 59 | 8 | | 5414 |
| PSM | KAWGEVKR | 723 | 8 | | 5415 |
| PSM | KAWGEVKRQIY | 723 | 11 | | 5416 |
| PAP | KDFIATLGK | 185 | 9 | 0.0004 | 5417 |
| PAP | KFLNESYK | 91 | 8 | | 5418 |
| PAP | KFLNESYKH | 91 | 9 | | 5419 |
| PSM | KFLYNFTQIPH | 72 | 11 | | 5420 |
| PSA | KFMLCAGR | 190 | 8 | | 5421 |
| PSM | KFSERLQDFDK | 645 | 11 | | 5422 |
| PSM | KFSGYPLY | 545 | 8 | | 5423 |
| PSM | KFSGYPLYH | 545 | 9 | | 5424 |
| PAP | KFVTLVFR | 36 | 8 | | 5425 |
| PAP | KFVTLVFRH | 36 | 9 | | 5426 |
| PSM | KFYDPMFK | 564 | 8 | | 5427 |
| PSM | KFYDPMFKY | 564 | 9 | | 5428 |
| PSM | KFYDPMFKYH | 564 | 10 | | 5429 |
| PAP | KGEYFVEMY | 322 | 9 | 0.0002 | 5430 |
| PAP | KGEYFVEMYY | 322 | 10 | 0.0890 | 5431 |
| PAP | KGEYFVEMYYR | 322 | 11 | | 5432 |
| PSM | KIVIARYGK | 199 | 9 | 1.0000 | 5433 |
| PSM | KIYSISMK | 610 | 8 | | 5434 |
| PSM | KIYSISMKH | 610 | 9 | 0.1200 | 5435 |
| PAP | KLIMYSAH | 282 | 8 | | 5436 |
| PSA | KLQCVDLH | 166 | 8 | | 5437 |
| PSM | KNAQLAGAK | 215 | 9 | | 5438 |
| PSM | KNFTEIASK | 637 | 9 | | 5439 |
| Kallikrein | KNSQVWLGR | 69 | 9 | | 5440 |
| Kallikrein | KNSQVWLGRH | 69 | 10 | | 5441 |
| PSM | KNWETNKFSGY | 539 | 11 | | 5442 |
| PAP | KSEEFQKR | 173 | 8 | | 5443 |
| PAP | KSEEFQKRLH | 173 | 10 | | 5444 |
| PSM | KSLYESWTK | 491 | 9 | 2.1000 | 5445 |
| PSM | KSLYESWTKK | 491 | 10 | 0.0810 | 5446 |
| PSM | KSNPIVLR | 655 | 8 | | 5447 |
| PSM | KSPDEGFEGK | 482 | 10 | 0.0210 | 5448 |
| PSA | KSVILLGR | 66 | 8 | | 5449 |
| PSA | KSVILLGRH | 66 | 9 | 0.0014 | 5450 |
| PSM | KVFRGNKVK | 207 | 9 | 0.1200 | 5451 |
| PSM | KVKNAQLAGAK | 213 | 11 | | 5452 |
| PSA | KVTKFMLCAGR | 187 | 11 | | 5453 |
| Kallikrein | KVVHYRKWIK | 245 | 10 | 0.0450 | 5454 |
| PSA | KVVHYRKWIK | 241 | 10 | 0.0450 | 5455 |
| PSM | LAGAKGVILY | 219 | 10 | 0.0002 | 5456 |
| PSM | LAHYDVLLSY | 110 | 10 | | 5457 |
| PSM | LAKQIQSQWK | 92 | 10 | 0.0007 | 5458 |
| Kallikrein | LCAGLWTGGK | 197 | 10 | | 5459 |
| PSA | LCAGRWTGGK | 193 | 10 | | 5460 |
| PSM | LDELKAENIK | 62 | 10 | | 5461 |
| PSM | LDELKAENIKK | 62 | 11 | | 5462 |
| PAP | LDRSVLAK | 26 | 8 | | 5463 |
| PAP | LDRSVLAKELK | 26 | 11 | | 5464 |
| PSM | LDSVELAH | 105 | 8 | | 5465 |
| PSM | LDSVELAHY | 105 | 9 | | 5466 |
| PAP | LDVYNGLLPPY | 300 | 11 | | 5467 |
| Kallikrein | LFEPEDTGQR | 80 | 10 | | 5468 |
| PSM | LFEPPPPGY | 143 | 9 | | 5469 |
| PAP | LFGIWSKVY | 202 | 9 | | 5470 |
| PAP | LFLLFFWLDR | 19 | 10 | | 5471 |
| PAP | LGEYIRKR | 81 | 8 | | 5472 |
| PAP | LGEYIRKRY | 81 | 9 | 0.0002 | 5473 |
| PAP | LGEYIRKRYR | 81 | 10 | 0.0002 | 5474 |
| PAP | LGEYIRKRYRK | 81 | 11 | | 5475 |
| PSM | LGFLFGWFIK | 35 | 10 | 0.3700 | 5476 |
| PSM | LGIASGRAR | 528 | 9 | 0.0002 | 5477 |
| PSM | LGIASGRARY | 528 | 10 | | 5478 |
| PAP | LGKLSGLH | 191 | 8 | | 5479 |
| PSM | LGLPDRPFY | 679 | 9 | | 5480 |
| PSM | LGLPDRPFYR | 679 | 10 | | 5481 |
| PSM | LGLPDRPFYRH | 679 | 11 | | 5482 |
| PSA | LGRHSLFH | 71 | 8 | | 5483 |
| PAP | LLFFWLDR | 21 | 8 | | 5484 |
| PSM | LLGFLFGWFIK | 34 | 11 | | 5485 |
| PSA | LLGRHSLFH | 70 | 9 | | 5486 |
| Kallikrein | LLKHQSLR | 105 | 8 | | 5487 |
| PSA | LLKNRFLR | 101 | 8 | | 5488 |
| PAP | LLPPYASCH | 306 | 9 | 0.0002 | 5489 |
| PSM | LLQERGVAY | 441 | 9 | | 5490 |
| Kallikrein | LLRLSEPAK | 123 | 9 | | 5491 |
| PAP | LLSLYGIH | 243 | 8 | | 5492 |
| PAP | LLSLYGIHK | 243 | 9 | 0.2000 | 5493 |
| PAP | LLSLYGIHKQK | 243 | 11 | | 5494 |
| Kallikrein | LLSNDMCAR | 178 | 9 | | 5495 |
| Kallikrein | LLSNDMCARAY | 178 | 11 | | 5496 |
| PSM | LLSYPNKTH | 116 | 9 | 0.0003 | 5497 |
| PAP | LLWQPIPVH | 136 | 9 | | 5498 |
| PAP | LLYLPFRNCPR | 153 | 11 | | 5499 |
| Kallikrein | LMLLRLSEPAK | 121 | 11 | | 5500 |
| PSM | LMYSLVHNLTK | 469 | 11 | | 5501 |
| PAP | LNESYKHEQVY | 93 | 11 | | 5502 |
| PAP | LSEDQLLY | 148 | 8 | | 5503 |
| PAP | LSELSLLSLY | 238 | 10 | 0.0004 | 5504 |
| PAP | LSLLSLYGIH | 241 | 10 | 0.0002 | 5505 |
| PAP | LSLLSLYGIHK | 241 | 11 | | 5506 |
| PAP | LSLYGIHK | 244 | 8 | | 5507 |
| PAP | LSLYGIHKQK | 244 | 10 | 0.0370 | 5508 |
| Kallikrein | LSNDMCAR | 179 | 8 | | 5509 |
| Kallikrein | LSNDMCARAY | 179 | 10 | | 5510 |
| PSM | LSYPNKTH | 117 | 8 | | 5511 |
| PSM | LSYPNKTHPNY | 117 | 11 | | 5512 |
| PSA | LTAAHCIR | 57 | 8 | | 5513 |
| PSA | LTAAHCIRNK | 57 | 10 | 0.0830 | 5514 |
| Kallikrein | LTAAHCLK | 61 | 8 | | 5515 |
| Kallikrein | LTAAHCLKK | 61 | 9 | | 5516 |
| PAP | LTELYFEK | 315 | 8 | 0.0100 | 5517 |
| PAP | LTELYFEKGEY | 315 | 11 | | 5518 |
| PSM | LTPGYPANEY | 268 | 10 | 0.0002 | 5519 |
| PAP | LTQLGMEQH | 70 | 9 | | 5520 |
| PAP | LTQLGMEQHY | 70 | 10 | 0.0024 | 5521 |
| PSM | LVEKFYDPMFK | 561 | 11 | | 5522 |
| PAP | LVFRHGDR | 40 | 8 | 0.0002 | 5523 |
| PSM | LVHNLTKELK | 473 | 10 | | 5524 |
| PAP | LVNEILNH | 263 | 8 | | 5525 |
| PAP | LVNEILNHMK | 263 | 10 | 0.1200 | 5526 |
| PAP | LVNEILNHMKR | 263 | 11 | | 5527 |
| PSM | LVYVNYAR | 174 | 8 | | 5528 |
| Kallikrein | MCARAYSEK | 183 | 9 | | 5529 |
| Kallikrein | MLCAGLWTGGK | 196 | 11 | | 5530 |
| PSA | MLCAGRWTGGK | 192 | 11 | | 5531 |
| Kallikrein | MLLRLSEPAK | 122 | 10 | | 5532 |
| PSM | MMNDQLMFLER | 663 | 11 | | 5533 |
| PSM | MNDQLMFLER | 664 | 10 | | 5534 |
| Kallikrein | MSLLKHQSLR | 103 | 10 | | 5535 |
| PSA | MSLLKNRFLR | 99 | 10 | 0.0110 | 5536 |
| PSM | NADSSIEGNY | 451 | 10 | | 5537 |
| PSM | NAQLAGAK | 216 | 8 | | 5538 |
| PSM | NCSGKIVIAR | 195 | 10 | | 5539 |
| PSM | NCSGKIVIARY | 195 | 11 | | 5540 |
| PSM | NDFEVFFQR | 519 | 9 | | 5541 |
| Kallikrein | NDMCARAY | 181 | 8 | | 5542 |
| Kallikrein | NDMCARAYSEK | 181 | 11 | | 5543 |
| PSM | NDQLMFLER | 665 | 9 | | 5544 |
| PSA | NDVCAQVH | 177 | 8 | | 5545 |
| PSA | NDVCAQVHPQK | 177 | 11 | | 5546 |
| PSM | NFSTQKVK | 336 | 8 | | 5547 |
| PSM | NFSTQKVKMH | 336 | 10 | | 5548 |
| PSM | NFTEIASK | 638 | 8 | | 5549 |
| PSM | NGAGDPLTPGY | 262 | 11 | | 5550 |
| PAP | NGLLPPYASCH | 304 | 11 | | 5551 |
| PSM | NITPKHNMK | 51 | 9 | | 5552 |
| Kallikrein | NLFEPEDTGQR | 79 | 11 | | 5553 |
| PSM | NLPGGGVQR | 247 | 9 | | 5554 |
| PSM | NMKAFLDELK | 57 | 10 | | 5555 |
| Kallikrein | NMSLLKHQSLR | 102 | 11 | | 5556 |
| PSM | NSIVLPFDCR | 589 | 10 | | 5557 |
| Kallikrein | NSQVWLGR | 70 | 8 | | 5558 |
| Kallikrein | NSQVWLGRH | 70 | 9 | | 5559 |
| PSM | NSRLLQER | 438 | 8 | | 5560 |
| PSM | PADYFAPGVK | 231 | 10 | | 5561 |
| PSA | PAELTDAVK | 125 | 9 | 0.0002 | 5562 |
| Kallikrein | PAKITDVVK | 129 | 9 | | 5563 |
| Kallikrein | PALGTTCY | 146 | 8 | | 5564 |
| PSA | PALGTTCY | 142 | 8 | | 5565 |
| PSM | PANEYAYR | 273 | 8 | | 5566 |
| PSM | PANEYAYRR | 273 | 9 | 0.0002 | 5567 |
| Kallikrein | PAVYTKVVH | 240 | 9 | | 5568 |
| Kallikrein | PAVYTKVVHY | 240 | 10 | | 5569 |
| Kallikrein | PAVYTKVVHYR | 240 | 11 | | 5570 |
| Kallikrein | PCALPEKPAVY | 233 | 11 | | 5571 |
| PSA | PCALPERPSLY | 229 | 11 | | 5572 |
| PSM | PDEGFEGK | 484 | 8 | | 5573 |
| PSM | PDEGFEGKSLY | 484 | 11 | | 5574 |
| PSM | PDRPFYRH | 682 | 8 | | 5575 |
| PSM | PDRPFYRHVIY | 682 | 11 | | 5576 |
| PSM | PDRYVILGGH | 368 | 10 | | 5577 |
| PSM | PDRYVILGGHR | 368 | 11 | | 5578 |
| PSM | PDSSWRGSLK | 315 | 10 | | 5579 |
| PSM | PFYRHVIY | 685 | 8 | | 5580 |
| PAP | PGCSPSCPLER | 345 | 11 | | 5581 |
| PSM | PGFTGNFSTQK | 331 | 11 | | 5582 |
| PSM | PGYPANEY | 270 | 8 | | 5583 |
| PSM | PGYPANEYAY | 270 | 10 | | 5584 |
| PSM | PGYPANEYAYR | 270 | 11 | | 5585 |
| PAP | PIDTFPTDPIK | 49 | 11 | | 5586 |
| PSM | PIGYYDAQK | 296 | 9 | | 5587 |
| PAP | PILLWQPIPVH | 134 | 11 | | 5588 |
| PSM | PLGLPDRPFY | 678 | 10 | | 5589 |
| PSM | PLGLPDRPFYR | 678 | 11 | | 5590 |
| PSM | PLMYSLVH | 468 | 8 | | 5591 |
| PAP | PLSEDQLLY | 147 | 9 | 0.0001 | 5592 |
| PSM | PLTPGYPANEY | 267 | 11 | | 5593 |
| PAP | PLYCESVH | 212 | 8 | | 5594 |
| PSA | PLYDMSLLK | 95 | 9 | 0.0370 | 5595 |
| PSA | PLYDMSLLKNR | 95 | 11 | | 5596 |
| PSM | PLYHSVYETY | 550 | 10 | 0.0002 | 5597 |
| Kallikrein | PLYNMSLLK | 99 | 9 | | 5598 |
| Kallikrein | PLYNMSLLKH | 99 | 10 | | 5599 |
| PSM | PNKTHPNY | 120 | 8 | | 5600 |
| PSM | PSIPVHPIGY | 290 | 10 | | 5601 |
| PSM | PSIPVHPIGYY | 290 | 11 | | 5602 |
| PSM | PSKAWGEVK | 721 | 9 | | 5603 |
| PSM | PSKAWGEVKR | 721 | 10 | 0.0002 | 5604 |
| PSA | PSLYTKVVII | 236 | 9 | | 5605 |
| PSA | PSLYTKVVHY | 236 | 10 | 0.0003 | 5606 |
| PSA | PSLYTKVVHYR | 236 | 11 | | 5607 |
| PSM | PSPEFSGMPR | 502 | 10 | | 5608 |
| PAP | PSWATEDTMTK | 224 | 11 | | 5609 |
| PAP | PSYKKLIMY | 278 | 9 | 0.0002 | 5610 |
| PSM | PVHPIGYY | 293 | 8 | | 5611 |
| Kallikrein | PVSHSFPH | 91 | 8 | | 5612 |
| Kallikrein | PVSHSFPHPLY | 91 | 11 | | 5613 |
| PAP | QDLFGIWSK | 200 | 9 | 0.0008 | 5614 |
| PAP | QDLFGIWSKVY | 200 | 11 | | 5615 |
| PSM | QGMPEGDLVY | 167 | 10 | | 5616 |
| PAP | QIPSYKKLIMY | 276 | 11 | | 5617 |
| PSM | QLAGAKGVILY | 218 | 11 | | 5618 |
| PSM | QLAKQIQSQWK | 91 | 11 | | 5619 |
| PAP | QLGMEQHY | 72 | 8 | | 5620 |
| PAP | QLLYLPFR | 152 | 8 | | 5621 |
| PAP | QLTQLGMEQII | 69 | 10 | | 5622 |
| PAP | QLTQLGMEQHY | 69 | 11 | | 5623 |
| PSM | QSGAAVVH | 389 | 8 | | 5624 |
| Kallikrein | QSLRPDEDSSH | 109 | 11 | | 5625 |
| Kallikrein | QVAVYSHGWAH | 39 | 11 | | 5626 |
| PSA | QVFQVSHSFPH | 84 | 11 | | 5627 |
| PSA | QVHPQKVTK | 182 | 9 | 0.0140 | 5628 |
| PSA | QVLVASRGR | 35 | 9 | 0.0018 | 5629 |
| PSA | QVSHSFPH | 87 | 8 | | 5630 |
| PSA | QVSHSFPHPLY | 87 | 11 | | 5631 |
| PAP | QVYIRSTDVDR | 101 | 11 | | 5632 |
| PAP | RAAPLLLAR | 2 | 9 | 0.1200 | 5633 |
| PAP | RATQIPSY | 273 | 8 | | 5634 |
| PAP | RATQIPSYK | 273 | 9 | 0.0600 | 5635 |
| PAP | RATQIPSYKK | 273 | 10 | 0.0250 | 5636 |
| PSA | RAVCGGVLVH | 43 | 10 | 0.0310 | 5637 |
| PSM | RDMKINCSGK | 190 | 10 | 0.0002 | 5638 |
| PSM | RDYAVVLR | 598 | 8 | | 5639 |
| PSM | RDYAVVLRK | 598 | 9 | 0.0190 | 5640 |
| PSM | RDYAVVLRKY | 598 | 10 | | 5641 |
| PSA | RFLRPGDDSSH | 105 | 11 | | 5642 |
| PAP | RFQELESETLK | 163 | 11 | | 5643 |
| PSM | RGAVEPDR | 363 | 8 | | 5644 |
| PSM | RGAVEPDRY | 363 | 9 | | 5645 |
| PSM | RGSLKVPY | 320 | 8 | | 5646 |
| Kallikrein | RIVGGWECEK | 24 | 10 | 0.0670 | 5647 |
| PSA | RIVGGWECEK | 20 | 10 | 0.0670 | 5648 |
| Kallikrein | RIVGGWECEKH | 24 | 11 | | 5649 |
| PSA | RIVGGWECEKH | 20 | 11 | | 5650 |
| PSM | RIYNVIGTLR | 354 | 10 | 0.4300 | 5651 |
| PSM | RLGIASGR | 527 | 8 | | 5652 |
| PSM | RLGIASGRAR | 527 | 10 | | 5653 |
| PSM | RLGIASGRARY | 527 | 11 | | 5654 |
| PSM | RLLQERGVAY | 440 | 10 | 0.0005 | 5655 |
| PAP | RNETQHEPY | 332 | 9 | 0.0002 | 5656 |
| PSA | RNKSVILLGR | 64 | 10 | | 5657 |
| PSA | RNKSVILLGRH | 64 | 11 | | 5658 |
| PSM | RSFGTLKK | 400 | 8 | | 5659 |
| Kallikrein | RSLQCVSLH | 169 | 9 | | 5660 |
| PAP | RSVLAKELK | 28 | 9 | 0.1100 | 5661 |
| PSM | RTEDFFKLER | 181 | 10 | | 5662 |
| PSM | RVDCTPLMY | 463 | 9 | | 5663 |
| Kallikrein | RVPVSHSFPH | 89 | 10 | | 5664 |
| PSM | SAPPDSSWR | 312 | 9 | 0.0012 | 5665 |
| PSM | SAVATARR | 10 | 8 | | 5666 |
| PSM | SAVATARRPR | tO | 10 | | 5667 |
| PAP | SCHLTELY | 312 | 8 | | 5668 |
| PAP | SCHLTELYFEK | 312 | 11 | | 5669 |
| PSM | SFDSLFSAVK | 628 | 10 | | 5670 |
| PSM | SFGTLKKEGWR | 401 | 11 | | 5671 |
| PSM | SGAAVVHEIVR | 390 | 11 | | 5672 |
| PSM | SGKIVIAR | 197 | 8 | | 5673 |
| PSM | SGKIVIARY | 197 | 9 | | 5674 |
| PSM | SGKIVIARYGK | 197 | 11 | | 5675 |
| PAP | SGLQMALDVY | 294 | 10 | | 5676 |
| PSM | SGMPRISK | 507 | 8 | | 5677 |
| PSM | SGNDFEVFFQR | 517 | 11 | | 5678 |
| PSM | SGRARYTK | 532 | 8 | | 5679 |
| PSM | SGYPLYHSVY | 547 | 10 | | 5680 |
| PSM | SIEGNYTLR | 455 | 9 | | 5681 |
| Kallikrein | SIEPEEFLR | 159 | 9 | | 5682 |
| Kallikrein | SIEPEEFLRPR | 159 | 11 | | 5683 |
| PSA | SIEPEEPLTPK | 155 | 11 | | 5684 |
| PSM | SIPVHPIGY | 291 | 9 | | 5685 |
| PSM | SIPVHPIGYY | 291 | 10 | 1.4000 | 5686 |
| PSM | SISMKHPQEMK | 613 | 11 | | 5687 |
| PSM | SIVLPFDCR | 590 | 9 | 0.0220 | 5688 |
| PSM | SIVLPFDCRDY | 590 | 11 | | 5689 |
| PSM | SLFEPPPPGY | 142 | 10 | | 5690 |
| Kallikrein | SLLKHQSLR | 104 | 9 | | 5691 |
| PSA | SLLKNRFLR | 100 | 9 | 0.0470 | 5692 |
| PAP | SLLSLYGIH | 242 | 9 | 0.0002 | 5693 |
| PAP | SLLSLYGIHK | 242 | 10 | 2.3000 | 5694 |
| Kallikrein | SLQCVSLH | 170 | 8 | | 5695 |
| Kallikrein | SLRPDEDSSH | 110 | 10 | | 5696 |
| PSM | SLVHNLTK | 472 | 8 | | 5697 |
| PSM | SLVHNLTKELK | 472 | 11 | | 5698 |
| PSM | SLYESWTK | 492 | 8 | | 5699 |
| PSM | SLYESWTKK | 492 | 9 | 2.0000 | 5700 |
| PAP | SLYGIHKQK | 245 | 9 | 0.8000 | 5701 |
| PAP | SLYGIHKQKEK | 245 | 11 | | 5702 |
| PSA | SLYTKVVH | 237 | 8 | | 5703 |
| PSA | SLYTKVVHY | 237 | 9 | 0.0140 | 5704 |
| PSA | SLYTKVVHYR | 237 | 10 | 0.2300 | 5705 |
| PSA | SLYTKVVHYRK | 237 | 11 | | 5706 |
| PSM | SMKHPQEMK | 615 | 9 | 0.0720 | 5707 |
| PSM | SMKHPQEMKTY | 615 | 11 | | 5708 |
| Kallikrein | SNDMCARAY | 180 | 9 | | 5709 |
| PSA | SNDVCAQVH | 176 | 9 | | 5710 |
| PSM | SNEATNITPK | 46 | 10 | | 5711 |
| PSM | SNEATNITPKH | 46 | 11 | | 5712 |
| Kallikrein | SSHDLMLLR | 117 | 9 | 1.2000 | 5713 |
| PSA | SSHDLMLLR | 113 | 9 | 1.2000 | 5714 |
| PSM | SSIEGNYTLR | 454 | 10 | 0.0910 | 5715 |
| PSM | SSNEATNITPK | 45 | 11 | | 5716 |
| PSM | SSWRGSLK | 317 | 8 | | 5717 |
| PSM | SSWRGSLKVPY | 317 | 11 | | 5718 |
| PAP | STECMTTNSH | 369 | 10 | | 5719 |
| PSM | STEWAEENSR | 431 | 10 | 0.0016 | 5720 |
| PSM | STNEVTRIY | 348 | 9 | 0.0083 | 5721 |
| PSM | STQKVKMH | 338 | 8 | | 5722 |
| PSM | STQKVKMHIH | 338 | 10 | | 5723 |
| PSA | SVILLGRH | 67 | 8 | | 5724 |
| PAP | SVLAKELK | 29 | 8 | 0.0061 | 5725 |
| PSM | SVYETYELVEK | 554 | 11 | | 5726 |
| PSA | TAAHCIRNK | 58 | 9 | 0.0140 | 5727 |
| Kallikrein | TAAHCLKK | 62 | 8 | | 5728 |
| PSM | TDSAVATAR | 8 | 9 | | 5729 |
| PSM | TDSAVATARR | 8 | 10 | | 5730 |
| PAP | TFPTDPIK | 52 | 8 | | 5731 |
| Kallikrein | TGAVPLIQSR | 15 | 10 | | 5732 |
| PSM | TGNFSTQK | 334 | 8 | | 5733 |
| PSM | TGNFSTQKVK | 334 | 10 | 0.0002 | 5734 |
| Kallikrein | TGQRVPVSH | 86 | 9 | | 5735 |
| PSA | TGQVFQVSH | 82 | 9 | 0.0002 | 5736 |
| PAP | TLGKLSGLH | 190 | 9 | | 5737 |
| PSM | TLKKEGWR | 404 | 8 | | 5738 |
| PSM | TLKKEGWRPR | 404 | 10 | 0.0002 | 5739 |
| PSM | TLKKEGWRPRR | 404 | 11 | | 5740 |
| PAP | TLKSEEFQK | 171 | 9 | 0.0078 | 5741 |
| PAP | TLKSEEFQKR | 171 | 10 | 0.0001 | 5742 |
| PSM | TLRGAVEPDR | 361 | 10 | 0.0002 | 5743 |
| PSM | TLRGAVEPDRY | 361 | 11 | | 5744 |
| PSM | TLRVDCTPLMY | 461 | 11 | | 5745 |
| PAP | TLVFRHGDR | 39 | 9 | 0.0002 | 5746 |
| PSM | TNEVTRIY | 349 | 8 | | 5747 |
| PSM | TNITPKHNMK | 50 | 10 | | 5748 |
| PSM | TNKFSGYPLY | 543 | 10 | | 5749 |
| PSM | TNKFSGYPLYH | 543 | 11 | | 5750 |
| PSM | TSLFEPPPPGY | 141 | 11 | | 5751 |
| PAP | TVPLSEDQLLY | 145 | 11 | | 5752 |
| PSM | VATARRPR | 12 | 8 | | 5753 |
| Kallikrein | VAVYSHGWAR | 40 | 10 | | 5754 |
| PSA | VCAQVHPQK | 179 | 9 | | 5755 |
| PSA | VCGGVLVH | 45 | 8 | | 5756 |
| PSM | VDCTPLMY | 464 | 8 | | 5757 |
| PSM | VDPSKAWGEVK | 719 | 11 | | 5758 |
| PSA | VFQVSHSFPH | 85 | 10 | | 5759 |
| PSM | VFRGNKVK | 208 | 8 | | 5760 |
| Kallikrein | VGGWECEK | 26 | 8 | | 5761 |
| PSA | VGGWECEK | 22 | 8 | | 5762 |
| Kallikrein | VGGWECEKH | 26 | 9 | | 5763 |
| PSA | VGGWECEKH | 22 | 9 | | 5764 |
| PSM | VGLPSIPVH | 287 | 9 | | 5765 |
| PSM | VIARYGKVFR | 201 | 10 | | 5766 |
| PSA | VILLGRHSLFH | 68 | 11 | | 5767 |
| PSM | VILYSDPADY | 225 | 10 | | 5768 |
| PSA | VISNDVCAQVH | 174 | 11 | | 5769 |
| PSM | VIYAPSSH | 690 | 8 | | 5770 |
| PSM | VIYAPSSHNK | 690 | 10 | 0.7900 | 5771 |
| PSM | VIYAPSSHNKY | 690 | 11 | | 5772 |
| PSM | VLLSYPNK | 115 | 8 | | 5773 |
| PSM | VLLSYPNKTH | 115 | 10 | | 5774 |
| PSM | VLPFDCRDY | 592 | 9 | | 5775 |
| PSM | VLRKYADK | 603 | 8 | | 5776 |
| PSM | VLRKYADKIY | 603 | 10 | | 5777 |
| PSA | VLTAAHCIR | 56 | 9 | 0.0005 | 5778 |
| PSA | VLTAAHCIRNK | 56 | 11 | | 5779 |
| Kallikrein | VLTAAHCLK | 60 | 9 | | 5780 |
| Kallikrein | VLTAAHCLKK | 60 | 10 | | 5781 |
| PSA | VLVASRGR | 36 | 8 | | 5782 |
| PAP | VLVNEILNH | 262 | 9 | 0.0030 | 5783 |
| PAP | VLVNEILNHMK | 262 | 11 | | 5784 |
| PAP | VNEILNHMK | 264 | 9 | | 5785 |
| PAP | VNEILNHMKR | 264 | 10 | | 5786 |
| PSM | VNYARTEDFFK | 177 | 11 | | 5787 |
| PSM | VSFDSLFSAVK | 627 | 11 | | 5788 |
| PAP | VSGLQMALDVY | 293 | 11 | | 5789 |
| Kallikrein | VSHSFPHPLY | 92 | 10 | 0.0015 | 5790 |
| PSA | VSHSFPHPLY | 88 | 10 | 0.0015 | 5791 |
| PSA | VTKFMLCAGR | 188 | 10 | 0.0120 | 5792 |
| PAP | VTLVFRHGDR | 38 | 10 | | 5793 |
| Kallikrein | VVHYRKWIK | 246 | 9 | 0.0930 | 5794 |
| PSA | VVHYRKWIK | 242 | 9 | 0.0930 | 5795 |
| PSM | VVLRKYADK | 602 | 9 | 0.0660 | 5796 |
| PSM | VVLRKYADKIY | 602 | 11 | | 5797 |
| Kallikrein | WAHCGGVLVH | 47 | 10 | | 5798 |
| PAP | WATEDTMTK | 226 | 9 | 0.0002 | 5799 |
| PAP | WATEDTMTKLR | 226 | 11 | | 5800 |
| PSM | WGEVKRQIY | 725 | 9 | | 5801 |
| Kallikrein | WGPEPCALPEK | 229 | 11 | | 5802 |
| PSA | WGSEPCALPER | 225 | 11 | | 5803 |
| Kallikrein | WGSIEPEEFLR | 157 | 11 | | 5804 |
| PSA | WIGAAPLILSR | 10 | 11 | | 5805 |
| PAP | WLDRSVLAK | 25 | 9 | 0.0150 | 5806 |
| PSM | WNLPGGGVQR | 246 | 10 | | 5807 |
| PAP | WSKVYDPLY | 206 | 9 | 0.0002 | 5808 |
| PAP | WSTECMTTNSH | 368 | 11 | | 5809 |
| PSA | WVLTAAHCIR | 55 | 10 | 0.0001 | 5810 |
| Kallikrein | WVLTAAHGLK | 59 | 10 | | 5811 |
| Kallikrein | WVLTAAHCLKK | 59 | 11 | | 5812 |
| PSM | YADKIYSISMK | 607 | 11 | | 5813 |
| PSM | YAGESFPGIY | 700 | 10 | | 5814 |
| PSM | YAPSSHNK | 692 | 8 | | 5815 |
| PSM | YAPSSHNKY | 692 | 9 | | 5816 |
| PSM | YARTEDFFK | 179 | 9 | | 5817 |
| PAP | YASCHLTELY | 310 | 10 | 0.0002 | 5818 |
| PSM | YAVVLRKY | 600 | 8 | | 5819 |
| PSM | YAVVLRKYADK | 600 | 11 | | 5820 |
| PSM | YDALFDIESK | 709 | 10 | | 5821 |
| PSM | YDAQKLLEK | 300 | 9 | 0.0002 | 5822 |
| PSA | YDMSLLKNR | 97 | 9 | | 5823 |
| PAP | YDPLYCESVH | 210 | 10 | | 5824 |
| PSM | YDPMFKYH | 566 | 8 | | 5825 |
| PSM | YDVLLSYPNK | 113 | 10 | 0.0016 | 5826 |
| PSM | YFAPGVKSY | 234 | 9 | | 5827 |
| PAP | YFVEMYYR | 325 | 8 | | 5828 |
| PAP | YGIHKQKEK | 247 | 9 | 0.0002 | 5829 |
| PAP | YGIHKQKEKSR | 247 | 11 | | 5830 |
| PSM | YGKVFRGNK | 205 | 9 | 0.0002 | 5831 |
| PSM | YGKVFRGNKVK | 205 | 11 | | 5832 |
| PAP | YIRKRYRK | 84 | 8 | | 5833 |
| PAP | YIRSTDVDR | 103 | 9 | | 5834 |
| PAP | YLPFRNCPR | 155 | 9 | | 5835 |
| PSM | YNFTQIPH | 75 | 8 | | 5836 |
| PAP | YNGLLPPY | 303 | 8 | | 5837 |
| Kallikrein | YNMSLLKH | 101 | 8 | | 5838 |
| PSM | YNVIGTLR | 356 | 8 | | 5839 |
| PSM | YSLVHNLTK | 471 | 9 | 0.5400 | 5840 |
| PSM | YTKNWETNK | 537 | 9 | | 5841 |
| Kallikrein | YTKVVHYR | 243 | 8 | | 5842 |
| PSA | YTKVVHYR | 239 | 8 | | 5843 |
| Kallikrein | YTKVVHYRK | 243 | 9 | 0.0580 | 5844 |
| PSA | YTKVVHYRK | 239 | 9 | 0.0580 | 5845 |
| PSM | YVILGGHR | 371 | 8 | | 5846 |

[0451] TABLE XVIII
Prostate A24 Motif Peptides with Binding Data

| | | | | | |
|---|---|---|---|---|---|
| | | | No. of | | Seq. |
| | | | Amino | | Id. |
| Protein | Sequence | Position | Acids | A*2401 | no. |

| | | | | | |
|---|---|---|---|---|---|
| PSM | AFIDPLGL | 674 | 8 | | 5847 |
| PSM | AFLDELKAENI | 60 | 11 | | 5848 |
| PSM | AFTVQAAAETL | 736 | 11 | | 5849 |
| PAP | AMTNLAAL | 116 | 8 | | 5850 |
| PAP | AMTNLAALF | 116 | 9 | 0.0150 | 5851 |
| PSM | AWGEVKRQI | 724 | 9 | | 5852 |
| PSM | AYINADSSI | 448 | 9 | 0.0190 | 5853 |
| Kallikrein | AYSEKVTEF | 187 | 9 | | 5854 |
| Kallikrein | AYSEKVTEFML | 187 | 11 | | 5855 |
| Kallikrein | CYASGWGSI | 152 | 9 | 0.1700 | 5856 |
| PSA | CYASGWGSI | 148 | 9 | 0.1700 | 5857 |
| PSM | DFDKSNPI | 652 | 8 | | 5858 |
| PSM | DFDKSNPIVL | 652 | 10 | | 5859 |
| PSM | DFEVFFQRL | 520 | 9 | | 5860 |
| PSM | DFEVFFQRLGI | 520 | 11 | | 5861 |
| PSM | DFFKLERDMKI | 184 | 11 | | 5862 |
| PAP | DFIATLGKL | 186 | 9 | 0.0002 | 5863 |
| PSM | DMKINCSGKI | 191 | 10 | | 5864 |
| PSA | DMSLLKNRF | 98 | 9 | 0.0001 | 5865 |
| PSA | DMSLLKNRFL | 98 | 10 | | 5866 |
| PSM | EFGLDSVEL | 102 | 9 | | 5867 |
| PSM | EFGLLGSTEW | 425 | 10 | | 5868 |
| Kallikrein | EFLRPRSL | 164 | 8 | | 5869 |
| PSA | EFLTPKKL | 160 | 8 | | 5870 |
| Kallikrein | EFMLCAGL | 194 | 8 | | 5871 |
| Kallikrein | EFMLCAGLW | 194 | 9 | | 5872 |
| PSM | EFSGMPRI | 505 | 8 | | 5873 |
| PSM | EFSGMPRISKL | 505 | 11 | | 5874 |
| PSM | EMKTYSVSF | 621 | 9 | 0.0010 | 5875 |
| PSM | EWAEENSRL | 433 | 9 | | 5876 |
| PSM | EWAEENSRLL | 433 | 10 | | 5877 |
| PSM | EYAYRRGI | 276 | 8 | | 5878 |
| PAP | EYIRKRYRKF | 83 | 10 | 0.0067 | 5879 |
| PAP | EYIRKRYRKFL | 83 | 11 | | 5880 |
| PSM | FFKLERDMKI | 185 | 10 | | 5881 |
| PSM | FFLLGFLF | 32 | 8 | | 5882 |
| PSM | FFLLGFLFGW | 32 | 10 | 0.0026 | 5883 |
| PSM | FFLLGFLFGWF | 32 | 11 | | 5884 |
| PAP | FFWLDRSVL | 23 | 9 | 0.0017 | 5885 |
| Kallikrein | FMLCAGLW | 195 | 8 | | 5886 |
| PSA | FMLCAGRW | 191 | 8 | | 5887 |
| PAP | FWLDRSVL | 24 | 8 | | 5888 |
| PSM | FYDPMFKYHL | 565 | 10 | 1.1000 | 5889 |
| PSM | GFEGKSLYESW | 487 | 11 | | 5890 |
| PSM | GFFLLGFL | 31 | 8 | | 5891 |
| PSM | GFFLLGFLF | 31 | 9 | 0.0190 | 5892 |
| PSM | GFFLLGFLFGW | 31 | 11 | | 5893 |
| PAP | GFGQLTQL | 66 | 8 | | 5894 |
| PSM | GFLFGWFI | 36 | 8 | | 5895 |
| PAP | GFLFLLFF | 17 | 8 | | 5896 |
| PAP | GFLFLLFFW | 17 | 9 | 0.0016 | 5897 |
| PAP | GFLFLLFFWL | 17 | 10 | 0.0007 | 5898 |
| PAP | GMEQHYEL | 74 | 8 | | 5899 |
| PSM | GMPRISKL | 508 | 8 | | 5900 |
| PSM | GMVFELANSI | 582 | 10 | 0.0002 | 5901 |
| Kallikrein | GWAHCGGVL | 46 | 9 | | 5902 |
| Kallikrein | GWECEKHSQPW | 28 | 11 | | 5903 |
| PSA | GWECEKHSQPW | 24 | 11 | | 5904 |
| Kallikrein | GWGSIEPEEF | 156 | 10 | 0.0001 | 5905 |
| PSA | GWGSIEPEEF | 152 | 10 | 0.0001 | 5906 |
| Kallikrein | GWGSIEPEEFL | 156 | 11 | | 5907 |
| PSA | GWGSIEPEEFL | 152 | 11 | | 5908 |
| PSM | GWRPRRTI | 409 | 8 | | 5909 |
| PSM | GWRPRRTIL | 409 | 9 | | 5910 |
| PSM | GWRPRRTILF | 409 | 10 | 0.0540 | 5911 |
| PSM | GYENVSDI | 150 | 8 | | 5912 |
| PSM | GYYDAQKL | 298 | 8 | | 5913 |
| PSM | GYYDAQKLL | 298 | 9 | | 5914 |
| PAP | HMKRATQI | 270 | 8 | | 5915 |
| PAP | HYELGEYI | 78 | 8 | | 5916 |
| Kallikrein | HYRKWIKDTI | 248 | 10 | 0.0550 | 5917 |
| PSA | HYRKWIKDTI | 244 | 10 | 0.0550 | 5918 |
| PAP | IWNPILLW | 131 | 8 | | 5919 |
| PAP | IWNPILLWQPI | 131 | 11 | | 5920 |
| PAP | IWSKVYDPL | 205 | 9 | 0.0024 | 5921 |
| PSM | IYDALFDI | 708 | 8 | | 5922 |
| PSM | IYNVIGTL | 355 | 8 | | 5923 |
| PSM | KFLYNFTQI | 72 | 9 | | 5924 |
| PSA | KFMLCAGRW | 190 | 9 | 0.0310 | 5925 |
| PSM | KFSERLQDF | 645 | 9 | | 5926 |
| PSM | KFYDPMFKYHL | 564 | 11 | | 5927 |
| PSM | KYADKIYSI | 606 | 9 | 12.0000 | 5928 |
| PSM | KYAGESFPGI | 699 | 10 | | 5929 |
| PSM | LFASWDAEEF | 417 | 10 | | 5930 |
| PAP | LFFWLDRSVL | 22 | 10 | 0.0045 | 5931 |
| PSA | LFHPEDTGQVF | 76 | 11 | | 5932 |
| PAP | LFLLFFWL | 19 | 8 | | 5933 |
| PAP | LFPPEGVSI | 123 | 9 | 0.0033 | 5934 |
| PAP | LFPPEGVSIW | 123 | 10 | 0.0140 | 5935 |
| PSM | LFSAVKNF | 632 | 8 | | 5936 |
| PSM | LFSAVKNFTEI | 632 | 11 | | 5937 |
| PSM | LMFLERAF | 668 | 8 | | 5938 |
| PSM | LMFLERAFI | 668 | 9 | 0.0075 | 5939 |
| PAP | LMSAMTNL | 113 | 8 | | 5940 |
| PAP | LMSAMTNLAAL | 113 | 11 | | 5941 |
| PSM | LMYSLVHNL | 469 | 9 | | 5942 |
| PAP | LYCESVHNF | 213 | 9 | 0.4400 | 5943 |
| PAP | LYGESVHNFTL | 213 | 11 | | 5944 |
| PSA | LYDMSLLKNRF | 96 | 11 | 0.1200 | 5945 |
| PAP | LYFEKGEYF | 318 | 9 | 2.5000 | 5946 |
| PSM | LYHSVYETYEL | 551 | 11 | | 5947 |
| PAP | LYLPFRNCPRF | 154 | 11 | | 5948 |
| PSM | LYNFTQIPHL | 74 | 10 | 0.2300 | 5949 |
| PSM | LYSDPADYF | 227 | 9 | 0.4400 | 5950 |
| PSA | LYTKVVHYRKW | 238 | 11 | | 5951 |
| PSM | MFLERAFI | 669 | 8 | | 5952 |
| PSM | MFLERAFIDPL | 669 | 11 | | 5953 |
| PSM | MMNDQLMF | 663 | 8 | | 5954 |
| PSM | MMNDQLMFL | 663 | 9 | | 5955 |
| Kallikrein | MWDLVLSI | 1 | 8 | | 5956 |
| Kallikrein | MWDLVLSIAL | 1 | 10 | | 5957 |
| PSM | MYSLVHNL | 470 | 8 | | 5958 |
| PSM | NFQLAKQI | 89 | 8 | | 5959 |
| PSM | NFSTQKVKMHI | 336 | 11 | | 5960 |
| PSM | NFTEIASKF | 638 | 9 | 0.0001 | 5961 |
| PSM | NFTQIPHL | 76 | 8 | | 5962 |
| PSM | NMKAFLDEL | 57 | 9 | | 5963 |
| Kallikrein | NMSLLKHQSL | 102 | 10 | | 5964 |
| PSM | NYARTEDF | 178 | 8 | | 5965 |
| PSM | NYARTEDFF | 178 | 9 | 0.7700 | 5966 |
| PSM | NYARTEDFFKL | 178 | 11 | | 5967 |
| PSM | NYTLRVDCTPL | 459 | 11 | | 5968 |
| PSM | PFDCRDYAVVL | 594 | 11 | | 5969 |
| PAP | PFRNCPRF | 157 | 8 | | 5970 |
| PAP | PFRNCPRFQEL | 157 | 11 | | 5971 |
| Kallikrein | PWQVAVYSHGW | 37 | 11 | | 5972 |
| PAP | PYASCHLTEL | 309 | 10 | 0.0240 | 5973 |
| PAP | PYKDFIATL | 183 | 9 | 0.1100 | 5974 |
| PSM | PYNVGPGF | 326 | 8 | | 5975 |
| PAP | QMALDVYNGL | 297 | 10 | 0.0001 | 5976 |
| PAP | QMALDVYNGLL | 297 | 11 | | 5977 |
| PSA | QWVLTAAHCI | 54 | 10 | 0.0007 | 5978 |
| Kallikrein | QWVLTAAHCL | 58 | 10 | | 5979 |
| PAP | RFAELVGPVI | 355 | 10 | 0.0037 | 5980 |
| PAP | RFQELESETL | 163 | 10 | 0.0001 | 5981 |
| PSM | RMMNDQLMF | 662 | 9 | | 5982 |
| PSM | RMMNDQLMFL | 662 | 10 | | 5983 |
| PSM | RWLCAGAL | 19 | 8 | | 5984 |
| PSM | RWLCAGALVL | 19 | 10 | | 5985 |
| PSM | RYTKNWETNKF | 536 | 11 | | 5986 |
| PSM | SFGTLKKEGW | 401 | 10 | | 5987 |
| PSM | SFPGIYDAL | 704 | 9 | | 5988 |
| PSM | SFPGIYDALF | 704 | 10 | | 5989 |
| PSA | SFPHPLYDMSL | 91 | 11 | | 5990 |
| Kallikrein | SFPHPLYNMSL | 95 | 11 | | 5991 |
| PAP | SWATEDTMTKL | 225 | 11 | | 5992 |
| PSM | SWDAEEFGL | 420 | 9 | | 5993 |
| PSM | SWDAEEFGLL | 420 | 10 | | 5994 |
| Kallikrein | SWGPEPCAL | 228 | 9 | | 5995 |
| PSA | SWGSEPCAL | 224 | 9 | 0.0001 | 5996 |
| PAP | SWPQGFGQL | 62 | 9 | 0.0013 | 5997 |
| PSM | SWTKKSPSPEF | 496 | 11 | | 5998 |
| PAP | SYKHEQVYI | 96 | 9 | 0.2600 | 5999 |
| PSM | SYPDGWNL | 241 | 8 | | 6000 |
| PSM | SYPNKTHPNYI | 118 | 11 | | 6001 |
| PAP | TMTKLREL | 231 | 8 | | 6002 |
| PAP | TMTKLRELSEL | 231 | 11 | | 6003 |
| PSA | TWIGAAPL | 9 | 8 | | 6004 |
| PSA | TWIGAAPLI | 9 | 9 | 0.1100 | 6005 |
| PSA | TWIGAAPLIL | 9 | 10 | 0.3600 | 6006 |
| PSM | TYELVEKF | 558 | 8 | | 6007 |
| PSM | TYSVSFDSL | 624 | 9 | | 6008 |
| PSM | TYSVSFDSLF | 624 | 10 | 3.2000 | 6009 |
| PSM | VFELANSI | 584 | 8 | | 6010 |
| PSM | VFELANSIVL | 584 | 10 | | 6011 |
| PSM | VFFQRLGI | 523 | 8 | | 6012 |
| PSA | VFLTLSVTW | 2 | 9 | 2.1000 | 6013 |
| PSA | VFLTLSVTWI | 2 | 10 | 0.0062 | 6014 |
| PSA | VFQVSHSF | 85 | 8 | | 6015 |
| PAP | VFRHGDRSPI | 41 | 10 | 0.0005 | 6016 |
| PSA | VMDLPTQEPAL | 134 | 11 | | 6017 |
| Kallikrein | VWLGRHNL | 73 | 8 | | 6018 |
| Kallikrein | VWLGRHNLF | 73 | 9 | | 6019 |
| PSM | VYETYELVEKF | 555 | 11 | | 6020 |
| Kallikrein | VYTKVVHYRKW | 242 | 11 | | 6021 |
| PSM | VYVNYARTEDF | 175 | 11 | | 6022 |
| PAP | YFEKGEYF | 319 | 8 | | 6023 |
| PSM | YYDAQKLL | 299 | 8 | | 6024 |

[0452] TABLE XIX
Prostate DR Supermotif Peptides

| | | | | | |
|---|---|---|---|---|---|
| Protein | Sequence | Seq. Id. No. | Core Sequence | Core Seq. Id. No | Position |

| | | | | | |
|---|---|---|---|---|---|
| PAP | ---MRAAPLLLARAA | 6025 | MRAAPLLLA | 6300 | 1 |
| Kallikrein | ---MWDLVLSIALSV | 6026 | MWDLVLSIA | 6301 | 1 |
| PSA | ---VVFLTLSVTWIG | 6027 | VVFLTLSVT | 6302 | 1 |
| Kallikrein | --MWDLVLSIALSVG | 6028 | WDLVLSIAL | 6303 | 2 |
| PSA | --VVFLTLSVTWIGA | 6029 | VFLTLSVTW | 6304 | 2 |
| PSA | -VVFLTLSVTWIGAA | 6030 | FLTLSVTWI | 6305 | 3 |
| PAP | AALFPPEGVSIWNPI | 6031 | FPPEGVSIW | 6306 | 124 |
| PSA | AAPLILSRIVGGWEC | 6032 | LILSRIVGG | 6307 | 16 |
| PAP | AAPLLLARAASLSLG | 6033 | LLLARAASL | 6308 | 6 |
| PAP | AASLSLGFLFLLFFW | 6034 | LSLGFLFLL | 6309 | 14 |
| PSM | ADKIYSISMKHPQEM | 6035 | IYSISMKHP | 6310 | 611 |
| PSM | AEAVGLPSIPVHPIG | 6036 | VGLPSIPVH | 6311 | 287 |
| PSM | AEEFGLLGSTEWAEE | 6037 | FGLLGSTEW | 6312 | 426 |
| PAP | AELVGPVIPQDWSTE | 6038 | VGPVIPQDW | 6313 | 360 |
| PSA | AGRWTGGKSTCSGDS | 6039 | WTGGKSTCS | 6314 | 198 |
| PSA | AHCIRNKSVILLGRH | 6040 | IRNKSVILL | 6315 | 63 |
| PAP | AKELKFVTLVFRHGD | 6041 | LKFVTLVFR | 6316 | 35 |
| PAP | ALDVYNGLLPPYASC | 6042 | VYNGLLPPY | 6317 | 302 |
| Kallikrein | ALSVGGTGAVPLIQS | 6043 | VGCTGAVPL | 6318 | 12 |
| PSA | APLILSRIVGGWECE | 6044 | ILSRIVGGW | 6319 | 17 |
| PAP | APLLLARAASLSLGF | 6045 | LLARAASLS | 6320 | 7 |
| Kallikrein | ARAYSEKVTEFMLCA | 6046 | YSEKVTEFM | 6321 | 188 |
| Kallikrein | ASGWGSIEPEEFLRP | 6047 | WGSIEPEEF | 6322 | 157 |
| PSA | ASGWGSIEPEEFLTP | 6048 | WGSIEPEEF | 6323 | 153 |
| PSM | AVGLPSIPVHPIGYY | 6049 | LPSIPVHPI | 6324 | 289 |
| PSA | AVKVMDLPTQEPALG | 6050 | VMDLPTQEP | 6325 | 134 |
| Kallikrein | AVPLIQSRIVGGWEC | 6051 | LIQSRIVGG | 6326 | 20 |
| PSA | CAQVHPQKVTKFMLC | 6052 | VHPQKVTKF | 6327 | 183 |
| PAP | CESVHNFTLPSWATE | 6053 | VHNFTLPSW | 6328 | 218 |
| Kallikrein | CNGVLQGITSWGPEP | 6054 | VLQGITSWG | 6329 | 222 |
| PSA | CNGVLQGITSWGSEP | 6055 | VLQGITSWG | 6330 | 218 |
| PAP | CPRFQELESETLKSE | 6056 | FQELESETL | 6331 | 164 |
| PSM | CTPLMYSLVHNLTKE | 6057 | LMYSLVHNL | 6332 | 469 |
| PSM | DEGFEGKSLYESWTK | 6058 | FEGKSLYES | 6333 | 488 |
| PSM | DFEVFFQRLGIASGR | 6059 | VFFQRLGIA | 6334 | 523 |
| PSA | DLHVISNDVCAQVHP | 6060 | VISNDVCAQ | 6335 | 174 |
| Kallikrein | DLVLSIALSVGCTGA | 6061 | LSIALSVGC | 6336 | 6 |
| PSM | DPMFKYHLTVAQVRG | 6062 | FKYHLTVAQ | 6337 | 570 |
| PSM | DQLMFLERAFIDPLG | 6063 | MFLERAFID | 6338 | 669 |
| PSM | DRPFYRHVIYAPSSH | 6064 | FYRHVIYAP | 6339 | 686 |
| PAP | DRSVLAKELKFVTLV | 6065 | VLAKELKFV | 6340 | 30 |
| PAP | DRTLMSAMTNLAALF | 6066 | LMSAMTNLA | 6341 | 113 |
| PSM | DSSIEGNYTLRVDCT | 6067 | IEGNYTLRV | 6342 | 456 |
| PAP | DTTVSGLQMALDVYN | 6068 | VSGLQMALD | 6343 | 293 |
| Kallikrein | EEFLRPRSLQCVSLH | 6069 | LRPRSLQCV | 6344 | 166 |
| PSA | EEFLTPKKLQCVDLH | 6070 | LTPKKLQCV | 6345 | 162 |
| PSM | EFGLDSVELAHYDVL | 6071 | LDSVELAHY | 6346 | 105 |
| PSM | ERDMKINCSGKIVIA | 6072 | MKINCSGKI | 6347 | 192 |
| PSM | ERGVAYINADSSIEG | 6073 | VAYINADSS | 6348 | 447 |
| PSM | ESKVDPSKAWGEVKR | 6074 | VDPSKAWGE | 6349 | 719 |
| PSM | EVEFQRLGIASGRAR | 6075 | FQRLGIASG | 6350 | 525 |
| PSM | EYAYRRGIAEAVGLP | 6076 | YRRGIAEAV | 6351 | 279 |
| PAP | FAELVGPVIPQDWST | 6077 | LVGPVIPQD | 6352 | 359 |
| PAP | FFWLDRSVLAKELKF | 6078 | LDRSVLAKE | 6353 | 26 |
| PAP | FGQLTQLGMEQHYEL | 6079 | LTQLGMEQH | 6354 | 70 |
| PAP | FLFLLFFWLDRSVLA | 6080 | LLFFWLDRS | 6355 | 21 |
| PSA | FLTLSVTWIGAAPLI | 6081 | LSVTWIGAA | 6356 | 6 |
| PAP | FQELESETLKSEEFQ | 6082 | LESETLKSE | 6357 | 167 |
| PSM | FSAFSPQGMPEGDLV | 6083 | ISPQGMPEG | 6358 | 164 |
| PSM | FSGYPLYHSVYETYE | 6084 | YPLYHSVYE | 6359 | 549 |
| PSM | FTEIASKFSERLQDF | 6085 | IASKFSERL | 6360 | 642 |
| PSM | GAAVVHEIVRSFGTL | 6086 | VVHEIVRSF | 6361 | 394 |
| PSM | GDLVYVNYARTEDFF | 6087 | VYVNYARTE | 6362 | 175 |
| PSM | GDPLTPGYPANEYAY | 6088 | LTPGYPANE | 6363 | 268 |
| PSM | GGFFLLGFLFGWFIK | 6089 | FLLGFLFGW | 6364 | 33 |
| PSM | GGGVQRGNILNLNGA | 6090 | VQRGNILNL | 6365 | 253 |
| PSA | GGPLVCNGVLQGITS | 6091 | LVCNGVLQG | 6366 | 213 |
| Kallikrein | GGPLVCNGVLQGITS | 6092 | LVCNGVLQG | 6367 | 217 |
| PAP | GGVLVNEILNHMKRA | 6093 | LVNEILNHM | 6368 | 263 |
| PSM | GKSLYESWTKKSPSP | 6094 | LYESWTKKS | 6369 | 493 |
| PSM | GKVFRGNKVKNAQLA | 6095 | FRGNKVKNA | 6370 | 209 |
| PSM | GMVFELANSIVLPFD | 6096 | FELANSIVL | 6371 | 585 |
| PSM | GNEIFNTSLFEPPPP | 6097 | IFNTSLFEP | 6372 | 138 |
| PSM | GNILNLNGAGDPLTP | 6098 | LNLNGAGDP | 6373 | 259 |
| PSM | GNKVKNAQLAGAKGV | 6099 | VKNAQLAGA | 6374 | 214 |
| PSM | GPGFTGNFSTQKVKM | 6100 | FTGNFSTQK | 6375 | 333 |
| PSA | GPLVCNGVLQGITSW | 6101 | VCNGVLQGI | 6376 | 214 |
| Kallikrein | GPLVGNGVLQGITSW | 6102 | VCNGVLQGI | 6377 | 218 |
| PAP | GPVIPQDWSTEGMTT | 6103 | IPQDWSTEC | 6378 | 364 |
| PAP | GQDLFGIWSKVYDPL | 6104 | LFGIWSKVY | 6379 | 202 |
| Kallikrein | GQRVPVSHSFPHPLY | 6105 | VPVSHSFPH | 6380 | 90 |
| PSA | GQVFQVSHSFPHPLY | 6106 | FQVSHSFPH | 6381 | 86 |
| PSA | GRAVCGGVLVHPQWV | 6107 | VCGGVLVHP | 6382 | 45 |
| PSM | GVAYINADSSIEGNY | 6108 | YINADSSIE | 6383 | 449 |
| PSM | GVILYSDPADYFAPG | 6109 | LYSDPADYF | 6384 | 227 |
| PSA | GVLVHPQWVLTAAHC | 6110 | VHPQWVLTA | 6385 | 51 |
| Kallikrein | GVLVHPQWVLTAAHC | 6111 | VHPQWVLTA | 6386 | 55 |
| PAP | GVSIWNPILLWQPIP | 6112 | IWNPILLWQ | 6387 | 131 |
| PSM | GWNLPGGGVQRGNIL | 6113 | LPGGGVQRG | 6388 | 248 |
| PSA | HDLMLLRLSEPAELT | 6114 | MLLRLSEPA | 6389 | 118 |
| Kallikrein | HDLMLLRLSEPAKIT | 6115 | MLLRLSEPA | 6390 | 122 |
| PSM | HEIVRSFGTLKKEGW | 6116 | VRSFGTLKK | 6391 | 399 |
| PAP | HEPYPLMLPGCSPSC | 6117 | YPLMLPGCS | 6392 | 340 |
| PAP | HEQVYIRSTDVDRTL | 6118 | VYIRSTDVD | 6393 | 102 |
| Kallikrein | HNLFEPEDTGQRVPV | 6119 | FEPEDTGQR | 6394 | 81 |
| PSA | HPLYDMSLLKNRFLR | 6120 | YDMSLLKNR | 6395 | 97 |
| Kallikrein | HPLYNMSLLKHQSLR | 6121 | YNMSLLKHQ | 6396 | 101 |
| PSA | HPQWVLTAAHCIRNK | 6122 | WVLTAAHCI | 6397 | 55 |
| Kallikrein | HPOWVLTAAHCLKKN | 6123 | WVLTAAHCL | 6398 | 59 |
| PSA | HSLFHPEDTGQVFQV | 6124 | FHPEDTGQV | 6399 | 77 |
| PSM | HSVYETYELVEKFYD | 6.125 | YETYELVEK | 6400 | 556 |
| PSM | HYDVLLSYPNKTHPN | 6126 | VLLSYPNKT | 6401 | 115 |
| PAP | IDTFPTDPIKESSWP | 6127 | FPTDPIKES | 6402 | 53 |
| PSM | IGYYDAQKLLEKMGG | 6128 | YDAQKLLEK | 6403 | 300 |
| PSM | IKKFLYNFTQIPIILA | 6129 | VLYNPTQIP | 6404 | 73 |
| PAP | ILLWQPIPVHTVPLS | 6130 | WQPIPVHTV | 6405 | 138 |
| PAP | IPSYKKLIMYSAHDT | 6131 | YKKLIMYSA | 6406 | 280 |
| Kallikrein | ITSWGPEPCALPEKP | 6132 | WGPEPCALP | 6407 | 229 |
| PSA | ITSWGSEPCALPERP | 6133 | WGSEPCALP | 6408 | 225 |
| PSM | IYSISMKHPQEMKTY | 6134 | ISMKHPQEM | 6409 | 614 |
| PSM | KAFLDELKAENIKKF | 6135 | LDELKAENI | 6410 | 62 |
| PSM | KEGWRPRRTILFASW | 6136 | WRPRRTILF | 6411 | 410 |
| PSM | KFLYNFTQIPHLAGT | 6137 | YNFTQIPHL | 6412 | 75 |
| PSM | KGVILYSDPADYFAP | 6138 | ILYSDPADY | 6413 | 226 |
| Kllikrein | KPAVYTKVVHYRKWI | 6139 | VYTKVVHYR | 6414 | 242 |
| PAP | KSRLQGGVLVNEILN | 6140 | LQGGVLVNE | 6415 | 258 |
| PSM | KVKMHHSTNEVTRI | 6141 | MHIHSTNEV | 6416 | 344 |
| PSM | KYHLTVAQVRGGMVF | 6142 | LTVAQVRGG | 6417 | 574 |
| PSM | LAHYDVLLSYPNKTH | 6143 | YDVLLSYPN | 6418 | 113 |
| PSM | LDELKAENIKKFLYN | 6144 | LKAENIKKF | 6419 | 65 |
| PAP | LDVYNGLLPPYASCH | 6145 | YNGLLPPYA | 6420 | 303 |
| PSM | LEKMGGSAPPDSSWR | 6146 | MGGSAPPDS | 6421 | 309 |
| PAP | LFFWLDRSVLAKELK | 6147 | WLDRSVLAK | 6422 | 25 |
| PSM | LFGWFIKSSNEATNI | 6148 | WFIKSSNEA | 6423 | 41 |
| PSM | LGFLFGWFIKSSNEA | 6149 | LFGWFIKSS | 6424 | 38 |
| Kallikrein | LHLLSNDMCARAYSE | 6150 | LSNDMCARA | 6425 | 179 |
| PAP | LHPYKDFIATLGKLS | 6151 | YKDFIATLG | 6426 | 184 |
| PSA | LHVISNDVCAQVHPQ | 6152 | ISNDVCAQV | 6427 | 175 |
| PAP | LIMYSAHDTTVSGLQ | 6153 | YSAHDTTVS | 6428 | 286 |
| PAP | LLFFWLDRSVLAKEL | 6154 | FWLDRSVLA | 6429 | 24 |
| PAP | LLYLPFRNCPRFQEL | 6155 | LPFRNCPRF | 6430 | 156 |
| PSM | LMFLERAFIDPLGLP | 6156 | LERAFIDPL | 6431 | 671 |
| PSA | LMLLRLSEPAELTDA | 6157 | LRLSEPAEL | 6432 | 120 |
| Kallikrein | LMLLRLSEPAKITDV | 6158 | LRLSEPAKI | 6433 | 124 |
| PAP | LPPYASCHLTELYFE | 6159 | YASCHLTEL | 6434 | 310 |
| PSM | LPSIPVHPIGYYDAQ | 6160 | IPVHPIGYY | 6435 | 292 |
| PAP | LPSWATEDTMTKLRE | 6161 | WATEDTMTK | 6436 | 226 |
| PSA | LQCVDLHVISNDVCA | 6162 | VDLHVISND | 6437 | 170 |
| Kallikrein | LQCVSLHLLSNDMCA | 6163 | VSLHLLSND | 6438 | 174 |
| PSM | LQDFDKSNPIVLRMM | 6164 | FDKSNPIVL | 6439 | 653 |
| Kallikrein | LQGITSWGPEPCALP | 6165 | ITSWGPEPC | 6440 | 226 |
| PSA | LQGITSWGSEPCALP | 6166 | ITSWGSEPC | 6441 | 222 |
| PAP | LRELSELSLLSLYGI | 6167 | LSELSLLSL | 6442 | 238 |
| PSM | LRMMNDQLMFLERAF | 6168 | MNDQLMFLE | 6443 | 664 |
| PAP | LSELSLLSLYGIHKQ | 6169 | LSLLSLYGI | 6444 | 241 |
| PAP | LSGLHGQDLFGIWSK | 6170 | LHGQDLFGI | 6445 | 197 |
| PAP | LSLLSLYGIHKQKEK | 6171 | LSLYGIHKQ | 6446 | 244 |
| PSM | LVYVNYARTEDFFKL | 6172 | VNYARTEDF | 6447 | 177 |
| PSM | MFKYHLTVAQVRGGM | 6173 | YHLTVAQVR | 6448 | 572 |
| PSM | MPRISKLGSGNDFEV | 6174 | ISKLGSGND | 6449 | 512 |
| PAP | MSAMTNLAALFPPEG | 6175 | MTNLAALFP | 6450 | 117 |
| Kallikrein | MSLLKHQSLRPDEDS | 6176 | LKHQSLRPD | 6451 | 106 |
| PSA | MSLLKNRFLRPGDDS | 6177 | LKNRFLRPG | 6452 | 102 |
| PAP | MTNLAALFPPEGVSI | 6178 | LAALFPPEG | 6453 | 120 |
| Kallikrein | MWDLVLSIALSVGCT | 6179 | LVLSTALSV | 6454 | 4 |
| PSM | MYSLVHNLTKELKSP | 6180 | LVHNLTKEL | 6455 | 473 |
| PAP | NESYKHEQVYIRSTD | 6181 | YKHEQVYIR | 6456 | 97 |
| PAP | NFTLPSWATEDTMTK | 6182 | LPSWATEDT | 6457 | 223 |
| PAP | NGLLPPYASCHLTEL | 6183 | LPPYASCHL | 6458 | 307 |
| Kallikrein | NGVLQGITSWGPEPC | 6184 | LQGITSWGP | 6459 | 223 |
| PSA | NGVLQGITSWGSEPC | 6185 | LQGITSWGS | 6460 | 219 |
| Kallikrein | NMSLLKHQSLRPDED | 6186 | LLKHQSLRP | 6461 | 105 |
| PAP | NPILLWQPIPVHTVP | 6187 | LLWQPIPVH | 6462 | 136 |
| PSM | NSIVLPFDCRDYAVV | 6188 | VLPFDCRDY | 6463 | 592 |
| PSM | NTSLFEPPPPGYENV | 6189 | LFEPPPPGY | 6464 | 143 |
| PSM | NYTLRVDCTPLMYSL | 6190 | LRVDCTPLM | 6465 | 462 |
| PSM | PADYFAPGVKSYPDG | 6191 | YFAPGVKSY | 6466 | 234 |
| Kallikrein | PCALPEKPAVYTKVV | 6192 | LPEKPAVYT | 6467 | 236 |
| PSA | PCALPERPSLYTKVV | 6193 | LPERPSLYT | 6468 | 232 |
| Kallikrein | PEEFLRPRSLQCVSL | 6194 | FLRPRSLQC | 6469 | 165 |
| PAP | PEGVSIWNPILLWQP | 6195 | VSIWNPILL | 6470 | 129 |
| PSA | PHPLYDMSLLKNRFL | 6196 | LYDMSLLKN | 6471 | 96 |
| Kallikrein | PHPLYNMSLLKHQSL | 6197 | LYNMSLLKH | 6472 | 100 |
| PAP | PILLWQPIPVHTVPL | 6198 | LWQPIPVHT | 6473 | 137 |
| PAP | PIPVHTVPLSEDQLL | 6199 | VHTVPLSED | 6474 | 143 |
| PSA | PKKLQCVDLHVISND | 6200 | LQCVDLHVI | 6475 | 167 |
| PAP | PLLLARAASLSLGFL | 6201 | LARAASLSL | 6476 | 8 |
| PAP | PLMLPGCSPSCPLER | 6202 | LPGCSPSCP | 6477 | 344 |
| PAP | PQDWSTECMTTNSHQ | 6203 | WSTECMTTN | 6478 | 368 |
| PSM | PQEMKTYSVSFDSLF | 6204 | MKTYSVSFD | 6479 | 622 |
| PSM | PQGMPEGDLVYVNYA | 6205 | MPEGDLVYV | 6480 | 169 |
| PSA | PQKVTKFMLCAGRWT | 6206 | VTKFMLCAG | 6481 | 188 |
| Kallikrein | PRSLQCVSLHLLSND | 6207 | LQCVSLHLL | 6482 | 171 |
| PSM | PRWLCAGALVLAGGF | 6208 | LCAGALVLA | 6483 | 21 |
| PSM | PYNVGPGFTGNFSTQ | 6209 | VGPGFTGNF | 6484 | 329 |
| PAP | PYPLMLPGCSPSGPL | 6210 | LMLPGCSPS | 6485 | 342 |
| PAP | QGGVLVNEILNHMKR | 6211 | VLVNEILNH | 6486 | 262 |
| PSM | QIYVAAFTVQAAAET | 6212 | VAAFTVQAA | 6487 | 734 |
| PSM | QSQWKEFGLDSVELA | 6213 | WKEFGLDSV | 6488 | 100 |
| Kallikrein | QVWLGRHNLFEPEDT | 6214 | LGRHNLFEP | 6489 | 75 |
| PAP | QVYIRSTDVDRTLMS | 6215 | IRSTDVDRT | 6490 | 104 |
| PSA | QWVLTAAHCIRNKSV | 6216 | LTAAHCIRN | 6491 | 57 |
| Kallikrein | QWVLTAAHCLKKNSQ | 6217 | LTAAHCLKK | 6492 | 61 |
| PSM | RAFIDPLGLPDRPFY | 6218 | IDPLGLPDR | 6493 | 676 |
| PSM | RDSWVFGGIDPQSGA | 6219 | WVFGGIDPQ | 6494 | 381 |
| PSM | RGGMVHFELANSIVLP | 6220 | MVFELANSI | 6495 | 583 |
| PSM | RHVIYAPSSHNKYAG | 6221 | IYAPSSHNK | 6496 | 691 |
| Kallikrein | RKWIKDTIAANP--- | 6222 | IKDTIAANP | 6497 | 253 |
| PSA | RKWIKDTIVANP--- | 6223 | IKDTIVANP | 6498 | 249 |
| PSM | RLGIASGRARYTKNW | 6224 | IASGRARYT | 6499 | 530 |
| PSM | RPRWLCAGALVLAGG | 6225 | WLCAGALVL | 6500 | 20 |
| PSA | RPSLYTKVVHYRKWI | 6226 | LYTKVVHYR | 6501 | 238 |
| PSM | RQIYVAAFTVQAAAE | 6227 | YVAAFTVQA | 6502 | 733 |
| PAP | RSPIDTFPTDPIKES | 6228 | IDTFPTDPI | 6503 | 50 |
| Kallikrein | RVPVSNSFPHPLYNM | 6229 | VSHSFPHPL | 6504 | 92 |
| PSM | SDIVPPFSAFSPQGM | 6230 | VPPFSAFSP | 6505 | 158 |
| Kallikrein | SEKVTEFMLCAGLWT | 6231 | VTEFMLCAG | 6506 | 192 |
| PSA | SHDLMLLRLSEPAEL | 6232 | LMLLRLSEP | 6507 | 117 |
| Kallikrein | SHDLMLLRLSEPAKI | 6233 | LMLLRLSEP | 6508 | 121 |
| Kallikrein | SIALSVGCTGAVPLI | 6234 | LSVGCTGAV | 6509 | 10 |
| PAP | SKVYDPLYCESVHNF | 6235 | YDPLYCESV | 6510 | 210 |
| Kallikrein | SLHLLSNDMCARAYS | 6236 | LLSNDMCAR | 6511 | 178 |
| PAP | SLSLGFLFLLFFWLD | 6237 | LGFLFLLFF | 6512 | 16 |
| PSM | SNPIVLRMMNDQLMF | 6238 | IVLRMMNDQ | 6513 | 659 |
| PSA | SQPWQVLVASRGRAV | 6239 | WQVLVASRG | 6514 | 34 |
| PSA | SRIVGGWECEKHSQP | 6240 | VGGWECEKH | 6515 | 22 |
| Kallikrein | SRIVGGWECEKHSQP | 6241 | VGGWECEKH | 6516 | 26 |
| PSM | SRLLQERGVAYINAD | 6242 | LQERGVAYI | 6517 | 442 |
| PAP | STDVDRTLMSAMTNL | 6243 | VDRTLMSAM | 6518 | 109 |
| PSM | STEWAEENSRLLQER | 6244 | WAEENSRLL | 6519 | 434 |
| PSM | SVELAHYDVLLSYPN | 6245 | LAHYDVLLS | 6520 | 110 |
| PSA | SVILLGRHSLFHPED | 6246 | LLGRHSLFH | 6521 | 70 |
| PSM | SVSFDSLFSAVKNFT | 6247 | FDSLFSAVK | 6522 | 629 |
| PSA | SVTWIGAAPLILSRI | 6248 | WIGAAPLIL | 6523 | 10 |
| PSM | SWVFGGIDPQSGAAV | 6249 | FGGIDPQSG | 6524 | 383 |
| PSA | TDAVKVMDLPTQEPA | 6250 | VKVMDLPTQ | 6525 | 132 |
| Kallikrein | TDVVKVLGLPTQEPA | 6251 | VKVLGLPTQ | 6526 | 136 |
| Kallikrein | TEFMLCAGLWTGGKD | 6252 | MLCAGLWTG | 6527 | 196 |
| Kallikrein | TGAVPLIQSRIVGGW | 6253 | VPLIQSRIV | 6528 | 18 |
| PSM | TGNFSTQKVKMHIHS | 6254 | FSTQKVKMH | 6529 | 337 |
| PSM | TILFASWDAEEFGLL | 6255 | FASWDAEEF | 6530 | 418 |
| PSM | TLRVDCTPLMYSLVH | 6256 | VDCTPLMYS | 6531 | 464 |
| PSA | TLSVTWIGAAPLILS | 6257 | VTWIGAAPL | 6532 | 8 |
| PSM | TNKFSGYPLYHSVYE | 6258 | FSGYPLYHS | 6533 | 546 |
| PSM | TRIYNVTGTLRGAVE | 6259 | YNVIGTLRG | 6534 | 356 |
| PSM | TSLFEPPPPGYENVS | 6260 | FEPPPPGYE | 6535 | 144 |
| PAP | TVPLSEDQLLYLPFR | 6261 | LSEDQLLYL | 6536 | 148 |
| PSM | TYSVSFDSLFSAVKN | 6262 | VSFDSLFSA | 6537 | 627 |
| PSM | VAAFTVQAAAETLSE | 6263 | FTVQAAAET | 6538 | 737 |
| PSM | VAQVRGGMVFELANS | 6264 | VRGGMVFEL | 6539 | 579 |
| Kallikrein | VAVYSHGWAHCGGVL | 6265 | YSHGWAHCG | 6540 | 43 |
| PSM | VAYINADSSIEGNYT | 6266 | INADSSIEG | 6541 | 450 |
| PAP | VEMYYRNETQHEPYP | 6267 | YYRNETQHE | 6542 | 330 |
| PSN | VFELANSIVLPFDCR | 6268 | LANSIVLPF | 6543 | 587 |
| PSA | VFQVSHSFPHPLYDM | 6269 | VSHSFPHPL | 6544 | 88 |
| PSM | VHPIGYYDAQKLLEK | 6270 | IGYYDAQKL | 6545 | 297 |
| PSA | VILLGRHSLFHPEDT | 6271 | LGRHSLFHP | 6546 | 71 |
| PSN | VKNFTEIASKFSERL | 6272 | FTEIASKFS | 6547 | 639 |
| Kallikrein | VLGLPTQEPALGTTC | 6273 | LPTQEPALG | 6548 | 141 |
| PSM | VLRMMNDQLMFLERA | 6274 | MMNDQLMFL | 6549 | 663 |
| PSA | VMDLPTQEPALGTTC | 6275 | LPTQEPALG | 6550 | 137 |
| Kallikrein | VPLIQSRIVGGWECE | 6276 | IQSRIVGGW | 6551 | 21 |
| PSM | VPPFSAFSPQGMPEG | 6277 | FSAFSPQGM | 6552 | 161 |
| PSM | VSDIVPPFSAFSPQG | 6278 | IVPPFSAFS | 6553 | 157 |
| PAP | VSIWNPILLWQPIPV | 6279 | WNPILLWQP | 6554 | 132 |
| PSA | VTWIGAAPLILSRIV | 6280 | IGAAPLILS | 6555 | 11 |
| PSA | VVFLTLSVTWIGAAP | 6281 | LTLSVTWIG | 6556 | 4 |
| Kallikrein | VVKVLGLPTQEPALG | 6282 | VLGLPTQEP | 6557 | 138 |
| Kallikrein | WDLVLSIALSVGCTG | 6283 | VLSIALSVG | 6558 | 5 |
| PSM | WKEFGLDSVELAHYD | 6284 | FGLDSVELA | 6559 | 103 |
| PSM | WNLLHETDSAVATAR | 6285 | LHETDSAVA | 6560 | 5 |
| PAP | WNPILLWQPIPVHTV | 6286 | ILLWQPIPV | 6561 | 135 |
| PAP | WQPIPVHTVPLSEDQ | 6287 | IPVHTVPLS | 6562 | 141 |
| PSM | YAVVLRKYADKTYSI | 6288 | VLRKYADKI | 6563 | 603 |
| PSM | YDALFDIESKVDPSK | 6289 | LFDIESKVD | 6564 | 712 |
| PAP | YDPLYCESVHNFTLP | 6290 | LYCESVHNF | 6565 | 213 |
| PSM | YDPMFKYHLTVAQVR | 6291 | MFKYHLTVA | 6566 | 569 |
| PSM | YENVSDIVPPFSAFS | 6292 | VSDIVPPFS | 6567 | 154 |
| PSM | YESWTKKSPSPEFSG | 6293 | WTKKSPSPE | 6568 | 497 |
| PAP | YKKLIMYSAHDTTVS | 6294 | LIMYSAHDT | 6569 | 283 |
| PAP | YNGLLPPYASCHLTE | 6295 | LLPPYASGH | 6570 | 306 |
| PAP | YPLMLPGCSPSCPLE | 6296 | MLPGGSPSC | 6571 | 343 |
| PSM | YRHVIYAPSSHNKYA | 6297 | VIYAPSSHN | 6572 | 690 |
| Kallikrein | YRKWIKDTIAANP-- | 6298 | WIKDTIAAN | 6573 | 252 |
| PSA | YRKWIKDTIVANP-- | 6299 | WIKDTIVAN | 6574 | 248 |

[0453] TABLE XXa
Prostate DR 3a Submotif Peptides

| | | | | | |
|---|---|---|---|---|---|
| Protein | Sequence | Seq. Id. No. | Core Sequence | Core Seq. Id. No | Position |

| | | | | | |
|---|---|---|---|---|---|
| PAP | AALFPPEGVSIWNPI | 6575 | FPPEGVSIW | 6615 | 124 |
| PSM | DQLMFLERAFIDPLG | 6576 | MFLERAFID | 6616 | 669 |
| PSM | EDFFKLERDMKINCS | 6577 | FKLERDMKI | 6617 | 186 |
| PAP | EMYYRNETQHEPYPL | 6578 | YRNETQHEP | 6618 | 331 |
| PSM | FGTLKKEGWRPRRTI | 6579 | LKKEGWRPR | 6619 | 405 |
| PAP | FQELESETLKSEEFQ | 6580 | LESETLKSE | 6620 | 167 |
| PSM | GAAVVHEIVRSFGTL | 6581 | VVHEIVRSF | 6621 | 394 |
| PAP | GGVLVNEILNHMKRA | 6582 | LVNEILNHM | 6622 | 263 |
| PAP | GLQMALDVYNGLLPP | 6583 | MALDVYNGL | 6623 | 298 |
| PAP | GPVIPQDWSTECMTT | 6584 | IPQDWSTEC | 6624 | 364 |
| PSM | GVILYSDPADYFAPG | 6585 | LYSDPADYF | 6625 | 227 |
| PSM | HNKYAGESFPGIYDA | 6586 | YAGESFPGI | 6626 | 700 |
| Kallikrein | HNLFEPEDTGQRVPV | 6587 | FEPEDTGQR | 6627 | 81 |
| Kallikrein | HQSLRPDEDSSHDLM | 6588 | LRPDEDSSH | 6628 | 111 |
| PSA | HSLFHPEDTGQVFQV | 6589 | FHPEDTGQV | 6629 | 77 |
| PAP | IDTFPTDPIKESSWP | 6590 | FPTDPIKES | 6630 | 53 |
| PSM | ISIINEDGNEIFNTS | 6591 | INEDGNEIF | 6631 | 131 |
| PAP | KGEYFVEMYYRNETQ | 6592 | YFVEMYYRN | 6632 | 325 |
| PSM | LDELKAENIKKFLYN | 6593 | LKAENIKKF | 6633 | 65 |
| Kallikrein | LHLLSNDMCARAYSE | 6594 | LSNDMCARA | 6634 | 179 |
| PSA | LHVISNDVCAQVHPQ | 6595 | ISNDVCAQV | 6635 | 175 |
| PAP | LLFFWLDRSVLAKEL | 6596 | FWLDRSVLA | 6636 | 24 |
| PAP | LTELYFEKGEYFVEM | 6597 | LYFEKGEYF | 6637 | 318 |
| PSM | MWNLLHETDSAVATA | 6598 | LLHETDSAV | 6638 | 4 |
| PAP | NESYKHEQVYIRSTD | 6599 | YKHEQVYIR | 6639 | 97 |
| PSM | NSRLLQERGVAYINA | 6600 | LLQERGVAY | 6640 | 441 |
| PSM | NYTLRVDCTPLMYSL | 6601 | LRVDCTPLM | 6641 | 462 |
| PSM | RGAVEPDRYVILGGH | 6602 | VEPDRYVIL | 6642 | 366 |
| PSM | RGGMVFELANSIVLP | 6603 | MVFELANSI | 6643 | 583 |
| PAP | SETLKSEEFQKRLHP | 6604 | LKSEEFQKR | 6644 | 172 |
| PAP | TVPLSEDQLLYLPFR | 6605 | LSEDQLLYL | 6645 | 148 |
| PSM | TYSVSFDSLFSAVKN | 6606 | VSFDSLFSA | 6646 | 627 |
| PSM | VAYINADSSIEGNYT | 6607 | INADSSIEG | 6647 | 450 |
| PSM | VLRMMNDQLMFLERA | 6608 | MMNDQLMFL | 6648 | 663 |
| Kallikrein | WGSIEPEEFLRPRSL | 6609 | IEPEEFLRP | 6649 | 160 |
| PSA | WGSIEPEEFLTPKKL | 6610 | IEPEEFLTP | 6650 | 156 |
| PSM | WKEFGLDSVELAHYD | 6611 | FGLDSVELA | 6651 | 103 |
| PAP | YDPLYCESVHNFTLP | 6612 | LYCESVHNF | 6652 | 213 |
| PSM | YISIINEDGNEIFNT | 6613 | IINEDGNEI | 6653 | 130 |
| PAP | YRKFLNESYKHEQVY | 6614 | FLNESYKHE | 6654 | 92 |
| PSM | AKQIQSQWKEFGLDS | 6655 | IQSQWKEFG | 6675 | 96 |
| PSM | DALFDIESKVDPSKA | 6656 | FDIESKVDP | 6676 | 713 |
| PSM | DKIYSISMKHPQEMK | 6657 | YSISMKHPQ | 6677 | 612 |
| PSM | DMKINCSGKIVIARY | 6658 | INCSGKIVI | 6678 | 194 |
| PAP | DPLYCESVHNFTLPS | 6659 | YCESVHNFT | 6679 | 214 |
| PSM | FFKLERDMKINCSGK | 6660 | LERDMKINC | 6680 | 188 |
| PSM | HVIYAPSSHNKYAGE | 6661 | YAPSSHNKY | 6681 | 692 |
| PSM | IYNVIGTLRGAVEPD | 6662 | VIGTLRGAV | 6682 | 358 |
| PAP | KKLIMYSAHDTTVSG | 6663 | IMYSAHDTT | 6683 | 284 |
| PAP | LTQLGMEQHYELGEY | 6664 | LGMEQHYEL | 6684 | 73 |
| PSM | MKAFLDELKAENIKK | 6665 | FLDELKAEN | 6685 | 61 |
| PSM | PSKAWGEVKRQIYVA | 6666 | AWGEVKRQI | 6686 | 724 |
| PAP | RKFLNESYKHEQVYI | 6667 | LNESYKIIEQ | 6687 | 93 |
| PAP | RSVLAKELKFVTLVF | 6668 | LAKELKFVT | 6688 | 31 |
| PSM | SIVLPFDCRDYAVVL | 6669 | LPFDCRDYA | 6689 | 593 |
| PSA | SNDVCAQVHPQKVTK | 6670 | VCAQVHPQK | 6690 | 179 |
| PSM | TDSAVATARRPRWLC | 6671 | AVATARRPR | 6691 | 11 |
| PAP | TECMTTNSHQGTEDS | 6672 | MTTNSHQGT | 6692 | 373 |
| PSM | TEWAEENSRLLQERG | 6673 | AEENSRLLQ | 6693 | 435 |
| PSM | VHNLTKELKSPDEGF | 6674 | LTKELKSPD | 6694 | 477 |

[0454] TABLE XXb
Prostate DR 3b Submotif Peptides

| | | | | | |
|---|---|---|---|---|---|
| Protein | Sequence | Seq. Id. No. | Core Sequence | Core Seq. Id. No | Position |

| | | | | | |
|---|---|---|---|---|---|
| PSM | AKQIQSQWKEFGLDS | 6655 | IQSQWKEFG | 6675 | 96 |
| PSM | DALFDIESKVDPSKA | 6656 | FDIESKVDP | 6676 | 713 |
| PSM | DKIYSISMKHPQEMK | 6657 | YSISMKHPQ | 6677 | 612 |
| PSM | DMKINCSGKIVIARY | 6658 | INCSGKIVI | 6678 | 194 |
| PAP | DPLYCESVHNFTLPS | 6659 | YCESVHNFT | 6679 | 214 |
| PSM | FFKLERDMKINCSGK | 6660 | LERDMKINC | 6680 | 188 |
| PSM | HVIYAPSSHNKYAGE | 6661 | YAPSSHNKY | 6681 | 692 |
| PSM | IYNVIGTLRGAVEPD | 6662 | VIGTLRGAV | 6682 | 358 |
| PAP | KKLIMYSAHDTTVSG | 6663 | IMYSAHDTT | 6683 | 284 |
| PAP | LTQLGMEQHYELGEY | 6664 | LGMEQHYEL | 6684 | 73 |
| PSM | MKAFLDELKAENIKK | 6665 | FLDELKAEN | 6685 | 61 |
| PSM | PSKAWGEVKRQIYVA | 6666 | AWGEVKRQI | 6686 | 724 |
| PAP | RKFLNESYKHEQVYI | 6667 | LNESYKIIEQ | 6687 | 93 |
| PAP | RSVLAKELKFVTLVF | 6668 | LAKELKFVT | 6688 | 31 |
| PSM | SIVLPFDCRDYAVVL | 6669 | LPFDCRDYA | 6689 | 593 |
| PSA | SNDVCAQVHPQKVTK | 6670 | VCAQVHPQK | 6690 | 179 |
| PSM | TDSAVATARRPRWLC | 6671 | AVATARRPR | 6691 | 11 |
| PAP | TECMTTNSHQGTEDS | 6672 | MTTNSHQGT | 6692 | 373 |
| PSM | TEWAEENSRLLQERG | 6673 | AEENSRLLQ | 6693 | 435 |
| PSM | VHNLTKELKSPDEGF | 6674 | LTKELKSPD | 6694 | 477 |

[0455] TABLE XXI
Population coverage with combined HLA Supertypes

| | PHENOTYPIC FREQUENCY | | | | | |
|---|---|---|---|---|---|---|
| | | North | | | | |
| | | American | | | | |
| HLA-SUPERTYPES | Caucasian | Black | Japanese | Chinese | Hispanic | Average |
| a. Individual Supertypes | | | | | | |
| A2 | 45.8 | 39.0 | 42.4 | 45.9 | 43.0 | 43.2 |
| A3 | 37.5 | 42.1 | 45.8 | 52.7 | 43.1 | 44.2 |
| B7 | 43.2 | 55.1 | 57.1 | 43.0 | 49.3 | 49.5 |
| A1 | 47.1 | 16.1 | 21.8 | 14.7 | 26.3 | 25.2 |
| A24 | 23.9 | 38.9 | 58.6 | 40.1 | 38.3 | 40.0 |
| B44 | 43.0 | 21.2 | 42.9 | 39.1 | 39.0 | 37.0 |
| B27 | 28.4 | 26.1 | 13.3 | 13.9 | 35.3 | 23.4 |
| B62 | 12.6 | 4.8 | 36.5 | 25.4 | 11.1 | 18.1 |
| B58 | 10.0 | 25.1 | 1.6 | 9.0 | 5.9 | 10.3 |
| b. Combined Supertypes | | | | | | |
| A2, A3, B7 | 84.3 | 86.8 | 89.5 | 89.8 | 86.8 | 87.4 |
| A2, A3, B7, A24, B44, A1 | 99.5 | 98.1 | 100.0 | 99.5 | 99.4 | 99.3 |
| A2, A3, B7, A24, B44, A1, | 99.9 | 99.6 | 100.0 | 99.8 | 99.9 | 99.8 |
| B27, B62, B58 | | | | | | |

[0456] TABLE XXII
Prostate Antigen Peptides

| Antigen | Sequence | |
|---|---|---|
| Binding | | |
| affinity ≦200 nM | | |
| PSA.117 | LMLLRLSEPA | |
| PSA.118 | MLLRLSEPAEL | |
| PSA.118 | MLLRLSEPA | |
| PSA.143 | ALGTTCYA | |
| PSA.161 | FLTPKKLQCV | |
| PSA.166 | KLQCVDLHV | |
| PAP.6 | LLLARAASLSL | |
| PAP.21 | LLFFWLDRSV | |
| PAP.30 | VLAKELKFV | SEQ ID NO 6827 |
| PAP.92 | FLNESYKHEQV | |
| PAP.112 | TLMSAMTNL | |
| PAP.135 | ILLWQPIPV | |
| PAP.284 | IMYSAHDTTV | |
| PAP.299 | ALDVYNGLL | |
| PSM.26 | LVLAGGFFL | |
| PSM.27 | VLAGGFFLL | |
| PSM.168 | GMPEGDLVYV | |
| PSM.288 | GLPSIPVHPI | |
| PSM.441 | LLQERGVAYI | |
| PSM.469 | LMYSLVHNL | |
| PSM.662 | RMMNDQLMFL | |
| PSM.663 | MMNDQLMFL | |
| PSM.667 | QLMFLERAFI | |
| PSM.711 | ALFDIESKV | |
| HuK2.165 | FLRPRSLQCV | |
| HuK2.175 | SLHLLSNDMCA | |
| Binding | | |
| affinity >200 nM | | |
| PSM.4 | LLHETDSAV | |
| PSM.25 | ALVLAGGFFL | |
| PSM.427 | GLLGSTEWA | |
| PSM.514 | KLGSGNDFEV | |

[0457] TABLE XXIIIA A2
supermotif cross-reactive binding data

| | | | | | | | | | |
|---|---|---|---|---|---|---|---|---|---|
| | | | | A*0201 | A*0202 | A*0203 | A*0206 | A*6802 | A2 Cross- |
| Peptide | AA | Sequence | Source | nM | nM | nM | nM | nM | Reactivity |

| | | | | | | | | | |
|---|---|---|---|---|---|---|---|---|---|
| 20.0044 | 9 | LLLARAASL | PAP.6 | 208 | 13 | 29 | 425 | — | 4 |
| 63.0136 | 11 | LLLARAASLSL | PAP.6 | 8.1 | 3.1 | 5.3 | 80 | 143 | 5 |
| 60.0201 | 9 | LLLARAASV | PAP.6.V9 | 18 | 215 | 6.7 | 95 | — | 4 |
| 20.0203 | 10 | LLARAASLSL | PAP.7 | 500 | 5.2 | 63 | 9250 | 5714 | 3 |
| 63.0031 | 10 | LLARAASLSV | PAP.7.V10 | 109 | 10 | 21 | 378 | 727 | 4 |
| 63.0137 | 11 | AASLSLGFLFL | PAP.11 | 227 | 23 | 53 | 95 | — | 4 |
| 1419.51 | 10 | SLSLGFLFLL | PAP.13 | 40 | 13 | 403 | 21 | 8560 | 4 |
| 1419.52 | 10 | SLSLGFLFLV | PAP.13.V10 | 1.8 | 3.9 | 17 | 42 | 355 | 5 |
| 1419.50 | 9 | SLSLGFLFV | PAP.13.V9 | 77 | 25 | 21 | 93 | — | 4 |
| 60.0203 | 9 | FLFLLFFWV | PAP.18.V9 | 42 | 307 | 625 | 308 | 90 | 4 |
| 63.0138 | 11 | FLLFFWLDRSV | PAP.20 | 14 | 17 | 2.8 | 285 | 364 | 5 |
| 1097.09 | 10 | LLFFWLDRSV | PAP.21 | 28 | 0.60 | 1.6 | 231 | — | 4 |
| 1418.23 | 10 | LTFFWLDRSV | PAP.21.T2 | 118 | 11 | 9.6 | 43 | 16 | 5 |
| 63.0139 | 11 | LLFFWLDRSVL | PAP.21 | 65 | 2.9 | 2.7 | 822 | 4444 | 3 |
| 63.0033 | 10 | SLLAKELKFV | PAP.29.L2 | 64 | 5.7 | 3.8 | 38 | 6667 | 4 |
| 1097.171 | 9 | VLAKELKFV | PAP.30 | 96 | 3.6 | 6.7 | 168 | — | 4 |
| 63.0142 | 11 | VLAKELKFVTL | PAP.30 | 6.9 | 8.1 | 21 | 25 | — | 4 |
| 63.0034 | 10 | VLAKELKFVV | PAP.30.V10 | 31 | 12 | 189 | 86 | 2286 | 4 |
| 1419.55 | 11 | FLNESYKHEQV | PAP.92 | 29 | 1.4 | 5.6 | 381 | 6154 | 4 |
| 1177.01 | 9 | TLMSAMTNL | PAP.112 | 43 | 0.80 | 2.9 | 285 | 296 | 5 |
| 20.0312 | 10 | TLMSAMTNLA | PAP.112 | 385 | 3.6 | 37 | 3700 | 6667 | 3 |
| 63.0037 | 10 | TLMSAMTNLV | PAP.112.V10 | 63 | 3.9 | 12 | 43 | 242 | 5 |
| 1419.56 | 9 | TLMSAMTNV | PAP.112.V9 | 10 | 2.4 | 3.6 | 54 | 62 | 5 |
| 1419.58 | 10 | LLALFPPEGV | PAP.120.L2 | 5.0 | 0.70 | 1.6 | 148 | 163 | 5 |
| 1419.59 | 10 | LVALFPPEGV | PAP.120.V2 | 156 | 17 | 4.8 | 463 | 28 | 5 |
| 1419.6 | 10 | ALFPPEGVSI | PAP.122 | 278 | 11 | 133 | 2643 | — | 3 |
| 1419.61 | 10 | ALFPPEGVSV | PAP.122.V10 | 15 | 1.0 | 18 | 119 | 4444 | 4 |
| 63.0041 | 10 | GVSIWNPILV | PAP.128.V10 | 250 | 94 | 23 | 451 | 2286 | 4 |
| 60.0207 | 9 | GVSIWNPIV | PAP.128.V9 | 455 | 269 | 909 | 308 | — | 3 |
| 63.0042 | 10 | PLLLWQPIPV | PAP.134.L2 | 238 | 47 | 19 | 336 | 3333 | 4 |
| 1044.04 | 9 | ILLWQPIPV | PAP.135 | 3.3 | 39 | 1.8 | 71 | 1702 | 4 |
| 1418.25 | 9 | ITLWQPIPV | PAP.135.T2 | 34 | 1720 | 6.2 | 26 | 32 | 4 |
| 1419.69 | 10 | LLWQPIPVHV | PAP.136.V10 | 25 | 1.8 | 17 | 287 | 60 | 5 |
| 1166.11 | 10 | GLHGQDLFGI | PAP.196 | 26 | 0.90 | 2.5 | 315 | — | 4 |
| 1419.62 | 10 | GLHGQDLFGV | PAP.196.V10 | 12 | 2.3 | 3.1 | 18 | — | 4 |
| 63.0048 | 10 | KLRELSELSV | PAP.234.V10 | 263 | 9.1 | 7.1 | 49 | 1818 | 4 |
| 1097.05 | 10 | IMYSAHDTTV | PAP.284 | 217 | 1.5 | 14 | 411 | — | 4 |
| 1389.06 | 10 | ILYSAHDITV | PAP.284.L2 | 385 | 1.0 | 15 | 1480 | 5714 | 3 |
| 60.0213 | 9 | TVSGLQMAV | PAP.292.V9 | 294 | 12 | 122 | 195 | 5.7 | 5 |
| 1177.02 | 9 | ALDVYNGLL | PAP.299 | 73 | 29 | 256 | 3083 | — | 3 |
| 1419.64 | 10 | LLPPYASCHV | PAP.306.V10 | 88 | 15 | 16 | 98 | 5260 | 4 |

--indicates binding affinity >10,000 nM.

[0458] TABLE XXIIIB A2
supermotif cross-reactive binding data

| | | | | | | | | | |
|---|---|---|---|---|---|---|---|---|---|
| | | | | A*0201 | A*0202 | A*0203 | A*0206 | A*6802 | A2 Cross- |
| Peptide | AA | Sequence | Source | nM | nM | nM | nM | nM | Reactivity |

| | | | | | | | | | |
|---|---|---|---|---|---|---|---|---|---|
| 1126.10 | 9 | VLAGGFFLL | PSM.27 | 39 | 0.20 | 33 | 31 | 2857 | 4 |
| 1389.20 | 9 | VLAGGFFLV | PSM.27.V9 | 26 | 0.40 | 5.0 | 57 | 216 | 5 |
| 1129.04 | 10 | GMPEGDLVYV | PSM.168 | 55 | 3.1 | 7.1 | 161 | 6154 | 4 |
| 1389.22 | 10 | GLPEGDLVYV | PSM.168.L2 | 42 | 2.0 | 2.1 | 112 | 964 | 4 |
| 1418.29 | 10 | GTPEGDLVYV | PSM.168.T2 | 313 | 134 | 53 | 40 | 571 | 4 |
| 1129.10 | 10 | GLPSIPVHPI | PSM.288 | 147 | 2.7 | 2.1 | 2467 | 308 | 4 |
| 1389.24 | 10 | GLPSIPVHIPV | PSM.288.V10 | 55 | 0.70 | 0.60 | 308 | 121 | 5 |
| 1129.01 | 10 | LLQERGVAYI | PSM.441 | 179 | 5.7 | 6.7 | 861 | — | 3 |
| 1126.14 | 9 | LMYSLVHNL | PSM.469 | 64 | 0.40 | 2.1 | 109 | 320 | 5 |
| 1126.06 | 10 | RMMNDQLMFL | PSM.662 | 9.8 | 2.7 | 7.7 | 40 | — | 4 |
| 1126.01 | 9 | MMNDQLMFL | PSM.663 | 11 | 0.80 | 1.7 | 7.6 | 195 | 5 |
| 1126.16 | 10 | QLMFLERAFI | PSM.667 | 98 | 36 | 91 | — | 30 | 4 |
| 1129.08 | 9 | ALFDIESKV | PSM.711 | 85 | 0.70 | 1.4 | 148 | 8889 | 4 |
| 1418.30 | 9 | ATFDIESKV | PSM.711.T2 | 238 | 27 | 44 | 82 | 258 | 5 |

--indicates binging affinity >10,000 nM.

[0459] TABLE XXIIIC A2
supermotif cross-reactive binding data

| | | | | | | | | | | |
|---|---|---|---|---|---|---|---|---|---|---|
| | | | | Alternate | A*0201 | A*0202 | A*0203 | A*0206 | A*6802 | A2 Cross- |
| Peptide | AA | Sequence | Source | Source | nM | nM | nM | nM | nM | Reactivity |

| | | | | | | | | | | |
|---|---|---|---|---|---|---|---|---|---|---|
| 1419.25 | 11 | VVFLTLSVTWI | PSA.1 | | 385 | 159 | 63 | 2846 | — | 3 |
| 63.0185 | 11 | VVFLTLSVTWV | PSA.1.V11 | | 89 | 88 | 71 | 336 | — | 4 |
| 63.0186 | 11 | FLTLSVTWIGV | PSA.3.V11 | | 6.8 | 3.0 | 18 | 65 | 114 | 5 |
| 60.0216 | 9 | FLTLSVTWV | PSA.3.V9 | | 53 | 8.4 | 8.3 | 49 | — | 4 |
| 60.0217 | 9 | TLSVTWIGV | PSA.5.V9 | | 26 | 4.9 | 40 | 712 | 229 | 4 |
| 1419.10 | 11 | VLVHPQWVLTA | PSA.49 | HuK2.53 | 294 | 7.7 | 101 | 2056 | — | 3 |
| 1419.11 | 11 | VLVHPQWVLTV | PSA.49.V11 | HuK2.53.V11 | 11 | 1.5 | 16 | 31 | 8889 | 4 |
| 63.0109 | 11 | DLMLLRLSEPV | PSA.116.V11 | HuK2.120.V11 | 50 | 57 | 29 | 148 | 2759 | 4 |
| 63.0014 | 10 | LMLLRLSEPA | PSA.117 | HuK2.121 | 200 | 17 | 67 | 925 | 5000 | 3 |
| 1418.43 | 10 | LMLLR.LSEPV | PSA.117.V10 | HuK2.121.V10 | 114 | 67 | 29 | 25 | 6154 | 4 |
| 1419.02 | 9 | MLLRLSEPA | PSA.118 | HuK2.122 | 195 | 745 | 145 | 49 | — | 3 |
| 1389.10 | 9 | MLLRLSEPV | PSA.118.V9 | HuK2.122.V9 | 36 | 36 | 46 | 638 | 421 | 4 |
| 1389.12 | 11 | MLLRLSEPAEV | PSA.118.V11 | | 294 | 331 | 115 | 1762 | 4444 | 3 |
| 1419.01 | 8 | ALGTTCYA | PSA.143 | HuK2.147 | 15 | 19 | 13 | 561 | — | 3 |
| 1389.14 | 8 | ALGTTCYV | PSA.143.V8 | HuK2.147.V8 | 74 | 6.4 | 12 | 264 | — | 4 |
| 1098.02 | 10 | FLTPKKLQCV | PSA.161 | | 52 | 8.3 | 13 | 755 | — | 3 |
| 990.01 | 9 | KLQCVDLHV | PSA.166 | | 79 | 205 | 91 | 6167 | — | 3 |
| 63.0058 | 10 | KLQCVDLHVV | PSA.166.V10 | | 13 | 84 | 9.1 | 500 | — | 4 |
| 60.0220 | 9 | KVTKFMLCV | PSA.187.V9 | | 69 | 518 | 53 | 128 | — | 3 |
| 1419.17 | 11 | PLVCNGVLQGV | PSA.212.V11 | HuK2.216.V11 | 27 | 127 | 19 | 255 | 4314 | 4 |
| 1418.55 | 10 | LVCNGVLQGV | PSA.213.V10 | HuK2.217.V10 | 10 | 2.9 | 12 | 5.6 | 3.5 | 5 |

--indicates binding affinity >10,000 nM.

[0460] TABLE XXIIID A2
supermotif cross-reactive binding data

| | | | | | | | | | | |
|---|---|---|---|---|---|---|---|---|---|---|
| | | | | Alternate | A*0201 | A*0202 | A*0203 | A*0206 | A*6802 | A2 Cross- |
| Peptide | AA | Sequence | Source | Source | nM | nM | nM | nM | nM | Reactivity |

| | | | | | | | | | | |
|---|---|---|---|---|---|---|---|---|---|---|
| 1418.13 | 9 | LLLSIALSV | HuK2.4.L2 | | 88 | 176 | 147 | 189 | — | 4 |
| 1418.57 | 11 | ILLSVGCTGAV | HuK2.8.L2 | | 36 | 33 | 36 | 308 | — | 4 |
| 1418.59 | 11 | ITLSVGCTGAV | HuK2.8.T2 | | 294 | 134 | 40 | 206 | 121 | 5 |
| 1419.05 | 10 | ALSVGCTGAV | HuK2.9 | | 53 | 75 | 17 | 542 | — | 3 |
| 1418.15 | 9 | ALSVGCTGV | HuK2.9.V9 | | 24 | 17 | 9.1 | 264 | — | 4 |
| 1418.35 | 10 | SVGCTGAVPV | HuK2.11.V10 | | 104 | 287 | 154 | 552 | 216 | 4 |
| 1419.10 | 11 | VLVHPQWVLTA | HuK2.53 | PSA.49 | 294 | 7.7 | 101 | 2056 | — | 3 |
| 1419.11 | 11 | VLVHPQWVLTV | HuK2.532V11 | PSA.49.V11 | 11 | 1.6 | 16 | 31 | 9378 | 4 |
| 63.0109 | 11 | DLMLLRLSEPV | HuK2.120.V11 | PSA.116.V11 | 50 | 57 | 29 | 148 | 2759 | 4 |
| 63.0014 | 10 | LMLLRLSEPA | HuK2.121 | PSA.117 | 200 | 17 | 67 | 925 | 5000 | 3 |
| 1418.43 | 10 | LMLLRLSEPV | HuK2.121.V0 | PSA.117.V10 | 1.14 | 67 | 29 | 25 | 6154 | 4 |
| 1419.02 | 9 | MILLRLSEPA | HuK2.122 | PSA.118 | 195 | 745 | 145 | 49 | — | 3 |
| 1389.10 | 9 | MLLRLSEPV | HuK2.122.V9 | PSA.118.V9 | 36 | 36 | 46 | 638 | 421 | 4 |
| 1419.01 | 8 | ALGTTCYA | HuK2.147 | PSA.143 | 15 | 19 | 13 | 561 | — | 3 |
| 1389.14 | 8 | ALGTTCYV | HuK2.147.V8 | PSA.143.V8 | 74 | 6.4 | 12 | 264 | — | 4 |
| 1419.07 | 10 | FLRPRSLQCV | HuK2.165 | | 186 | 4.8 | 4.2 | — | — | 3 |
| 60.0191 | 9 | SLQCVSLHL | HuK2.170 | | 500 | 51 | 417 | 6167 | 2581 | 3 |
| 1419.66 | 10 | SLQCVSLHLL | HuK2.170 | | 263 | 4.9 | 71 | 446 | 5000 | 4 |
| 1418.52 | 10 | SLQCVSLHLV | HuK2.170.V10 | | 13 | 6.3 | 2.8 . | 5.2 | 205 | 5 |
| 1418.19 | 9 | SLQCVSLHV | HuK2.170.V9 | | 56 | 165 | 48 | 4111 | 1600 | 3 |
| 1419.14 | 11 | SLHLLSNDMCA | HuK2.175 | | 71 | 4.8 | 71 | — | — | 3 |
| 1418.66 | 11 | SLHLLSNDMCV | HuK2.175.V11 | | 8.6 | 0.80 | 10 | 2313 | 2162 | 3 |
| 1419.15 | 11 | HLLSNDMCARA | HuK2.177 | | 417 | 391 | 250 | 374 | — | 4 |
| 1418.67 | 11 | HLLSNDMCARV | HuK2.177.V11 | | 26 | 1.3 | 5.3 | 37 | 860 | 4 |
| 1418.20 | 9 | HLLSNDMCV | HuK2.177.V9 | | 119 | 102 | 278 | 176 | — | 4 |
| 1418.53 | 10 | LLSNDMCARV | HuK2.178.V10 | | 5.3 | 0.70 | 4.3 | 10 | 1702 | 4 |
| 1418.71 | 11 | KVTEFMLCAGV | HuK2.191.V11 | | 56 | 10 | 26 | 29 | 143 | 5 |
| 1418.21 | 9 | KVTEFMLCV | HuK2.191.V9 | | 53 | 27 | 31 | 34 | 6667 | 4 |
| 1418.22 | 9 | FMLCAGLWV | HuK2.195.V9 | | 29 | 12 | 91 | 51 | — | 4 |
| 1419.17 | 11 | PLVCNGVLQGV | HuK2.216.V11 | PSA.212.V11 | 27 | 127 | 19 | 255 | 4314 | 4 |
| 1418.55 | 10 | LVCNGVLQGV | HuK2.217.V10 | PSA.213.V11 | 10 | 2.9 | 12 | 5.6 | 3.5 | 5 |

-- indicates binding affinity >10,000 nM.

[0461] TABLE XXIVA
Immunogenicity of A2 cross-reactive binding peptides and peptide analogs

| | | | | | | | | | | | | |
|---|---|---|---|---|---|---|---|---|---|---|---|---|
| | | | | | | | | | Cross | | | |
| Peptide | | | | A*0201 | A*0202 | A*0203 | A*0206 | A*6802 | Reactivity | A2 | A2 | A2 |
| ID | AA | Sequence | Source | nM | nM | nM | nM | nM | (≦200nM) | peptide | native | in vivo |

| | | | | | | | | | | | | |
|---|---|---|---|---|---|---|---|---|---|---|---|---|
| 1419.51 | 10 | SLSLGFLFLL | PAP.13 | 40 | 13 | 403 | 21 | 8560 | 3 | | | |
| 1419.52 | 10 | SLSLGFLFLV | PAP.13.V10 | 1.8 | 3.9 | 17 | 42 | 355 | 4 | | | |
| 1097.09 | 10 | LLFFWLDRSV | PAP.21 | 28 | 0.60 | 1.6 | 231 | — | 3 | 3/3 | | 0/3 |
| 1418.23 | 10 | LTFFWLDRSV | PAP.21.T2 | 118 | 11 | 9.6 | 43 | 16 | 5 | 3/3 | 2/3 | |
| 1097.17 | 9 | VLAKELKFV | PAP.30 | 96 | 3.6 | 6.7 | 168 | — | 4 | 1/3 | | 0/3 |
| 1177.01 | 9 | TLMSAMTNL | PAP.112 | 43 | 0.80 | 2.9 | 285 | 296 | 3 | 2/2 | | 3/3 |
| 1419.58 | 10 | LLALFPPEGV | PAP.120.L2 | 5.0 | 0.72 | 1.6 | 146 | 164 | 5 | | | |
| 1419.61 | 10 | ALFPPEGVSV | PAP.122.V10 | 15 | 1.0 | 18 | 120 | 4387 | 4 | 1/3 | 1/3 | |
| 1044.04 | 9 | ILLWQPIPV | PAP.135 | 3.3 | 39 | 1.8 | 71 | 8511 | 4 | 5/5 | | 1/6 |
| 1418.25 | 9 | ITLWQPLPV | PAP.135.T2 | 34 | 1723 | 6.2 | 26 | 32 | 4 | 3/3 | 2/3 | |
| 1419.69 | 10 | LLWQPIPVHV | PAP.136.V10 | 25 | 1.8 | 17 | 287 | 60 | 4 | | | |
| 1166.11 | 10 | GLHGQDLFGI | PAP.196 | 26 | 0.9 | 2.5 | 315 | — | 3 | | | |
| 1419.62 | 10 | GLHGQDLFGV | PA.P.196.V10 | 12 | 2.3 | 3.2 | 18 | — | 4 | | | |
| 1097.05 | 10 | IMYSAHDTTV | PAP.284 | 217 | 1.5 | 14 | 411 | — | 2 | 3/3 | | 0/3 |
| 1419.64 | 10 | LLPPYASCHV | PAP.306.V10 | 88 | 15 | 16 | 98 | 5260 | 4 | | | |

[0462] TABLE XXIVB
Immunogenicity of A2 cross-reactive binding peptide and peptide analogs

| | | | | | | | | | | | | |
|---|---|---|---|---|---|---|---|---|---|---|---|---|
| | | | | | | | | | Cross | | | |
| Peptide | | | | A*0201 | A*0202 | A*0203 | A*0206 | A*6802 | Reactivity | A2 | A2 | A2 |
| ID | AA | Sequence | Source | nM | nM | nM | nM | nM | (≦200 nM) | peptide | native | in vivo |

| | | | | | | | | | | | | |
|---|---|---|---|---|---|---|---|---|---|---|---|---|
| 1126.10 | 9 | VLAGGFFLL | PSM.27 | 39 | 0.20 | 33 | 31 | — | 4 | 1/2 | | 3/3 |
| 1389.20 | 9 | VLAGGFFLV | PSM.27.V9 | 26 | 0.40 | 5.0 | 57 | 216 | 4 | 1/2 | 1/2 | |
| 1129.04 | 10 | GMPEGDLVYY | PSM.168 | 55 | 3.1 | 7.1 | 161 | — | 4 | 0/1 | | 1/3 |
| 1129.10 | 10 | GLPSIPVHPI | PSM.288 | 147 | 2.7 | 2.1 | 2467 | 1538 | 3 | 2/4 | | 0/3 |
| 1389.24 | 10 | GLPSIPVHPV | PSM.288.V10 | 55 | 0.70 | 0.60 | 308 | 121 | 4 | 4/4 | 3/4 | |
| 1129.01 | 10 | LLQERGVAYI | PSM.441 | 179 | 5.7 | 6.7 | 861 | — | 3 | 3/3 | | |
| 1126.14 | 9 | LMYSLVHNL | PSM.469 | 64 | 0.40 | 2.1 | 109 | 1600 | 4 | 3/3 | | 3/3 |
| 1126.06 | 10 | RMMNDQLMFL | PSM.662 | 9.8 | 2.7 | 7.7 | 40 | — | 4 | 1/1 | | 20/22 |
| 1126.01 | 9 | MMNDQLMFL | PSM.663 | 11 | 0.80 | 1.7 | 7.6 | 976 | 4 | 2/2 | | 3/3 |
| 1129.08 | 9 | ALFDIESKV | PSM.711 | 85 | 0.70 | 1.4 | 148 | — | 4 | 2/2 | | 3/3 |

[0463] TABLE XXIVC

Immunogenicity of A2 cross-reactive
binding peptides and peptide analogs

| | | | | | | | |
|---|---|---|---|---|---|---|---|
| Peptide | | | | Alternate | A*0201 | A*0202 | A*0203 |
| ID | AA | Sequence | Source | Source | nM | nM | nM |

| | | | | | | | |
|---|---|---|---|---|---|---|---|
| 1419.27 | 11 | FLTLSVTWIGV | PSA.3.V11 | | 6.8 | 3.0 | 18 |
| 1419.11 | 11 | VLVHPQWVLTV | PSA49.V11 | HuK2.53.V11 | 11 | 1.6 | 16 |
| 1419.13 | 11 | DLMLLRLSEPV | PSA.116.V11 | HuK2.120.V11 | 50 | 57 | 29 |
| 1419.02 | 9 | MLLRLSEPA | PSA.118 | HuK2.122 | 195 | 745 | 145 |
| 1389.10 | 9 | MLLRLSEPV | PSA.118.V9 | HuK2.122.V9 | 36 | 36 | 46 |
| 1419.01 | 8 | ALGTTCYA | PSA.143 | PSA.143 | 15 | 19 | 13 |
| 1389.14 | 8 | ALGTTCYV | PSA.143.V8 | HuK2.147.V8 | 74 | 6.4 | 12 |
| 1098.02 | 10 | FLTPKKLQCV | PSA.161 | | 52 | 8.3 | 13 |
| 990.01 | 9 | KLQCVDLHV | PSA.166 | | 79 | 205 | 91 |
| 1419.24 | 10 | KLQCVDLHVV | PSA.166.V10 | | 13 | 84 | 9.5 |
| 1419.17 | 11 | PLVCNGVLQGV | PSA.212.V11 | HuK2.216.V11 | 27 | 127 | 19 |

| | | | | | | |
|---|---|---|---|---|---|---|
| | | | Cross- | | | |
| Peptide | A*0206 | A*6802 | Reactivity | A2 | A2 | A2 |
| ID | nM | nM | (≦200 nM) | peptide | native | in vivo |

| | | | | | | |
|---|---|---|---|---|---|---|
| 1419.27 | 65 | 113 | 5 | 3/3 | 3/3 | |
| 1419.11 | 31 | 9378 | 4 | | | |
| 1419.13 | 148 | 2759 | 4 | | | |
| 1419.02 | 49 | — | 3 | | | |
| 1389.10 | 638 | 421 | 3 | 3/3 | 1/3 | |
| 1419.01 | 562 | — | 3 | | | |
| 1389.14 | 264 | — | 3 | 2/3 | 1/3 | |
| 1098.02 | 755 | — | 3 | 3/4 | | 0/6 |
| 990.01 | 6167 | — | 2 | 1/2 | | 1/3 |
| 1419.24 | 502 | — | 3 | 1/2 | 1/2 | |
| 1419.17 | 255 | 4314 | 3 | | | |

[0464] TABLE XXIVD

Immunogenicity of A2 cross-reactive
binding peptides and peptide analogs

| | | | | | | | | |
|---|---|---|---|---|---|---|---|---|
| | | | | | Alternate | A*0201 | A*0202 | A*0203 |
| Peptide | ID | AA | Sequence | Source | Source | nM | nM | nM |

| | | | | | | | |
|---|---|---|---|---|---|---|---|
| 1418.13 | 9 | LLLSIALSV | HuK2.4.L2 | | 88 | 176 | 147 |
| 1419.05 | 10 | ALSVGCTGAV | HuK2.9 | | 53 | 75 | 17 |
| 1419.11 | 11 | VLVHPQWVLTV | HuK2.53.V11 | PSA49.V11 | 11 | 1.6 | 16 |
| 1419.13 | 11 | DLMLLRLSEPV | HuK2.120.V11 | PSA.116.V11 | 50 | 57 | 29 |
| 1419.02 | 9 | MLLRLSEPA | HuK2.122 | PSA.118 | 195 | 745 | 145 |
| 1389.10 | 9 | MLLRLSEPV | HuK2.122.V9 | PSA.118.V9 | 36 | 36 | 46 |
| 1419.01 | 8 | ALGTTCYA | HuK2.147 | PSA.143 | 15 | 19 | 13 |
| 1389.14 | 8 | ALGTTCYV | HuK2.147.V8 | PSA.143.V8 | 74 | 6.4 | 12 |
| 1419.07 | 10 | FLRPRSLQCV | HuK2.165 | | 186 | 4.8 | 4 |
| 1419.14 | 11 | SLHLLSNDMCA | HuK2.175 | | 72 | 4.8 | 73 |
| 1419.17 | 11 | PLVCNGVLQGV | HuK2.216.V11 | PSA.212.V11 | 27 | 127 | 19 |

| | | | | | | |
|---|---|---|---|---|---|---|
| | | | Cross- | | | |
| | A*0206 | A*6802 | Reactivity | A2 | A2 | A2 |
| Peptide | nM | nM | (≦200 nM) | peptide | native | in vivo |

| | | | | | |
|---|---|---|---|---|---|
| 1418.13 | 189 | — | 4 | 2/2 | 2/2 |
| 1419.05 | 542 | — | 3 | | |
| 1419.11 | 31 | 9378 | 4 | 2/2 | 2/2 |
| 1419.13 | 148 | 2759 | 4 | 2/2 | 2/2 |
| 1419.02 | 49 | — | 3 | | |
| 1389.10 | 638 | 421 | 3 | | |
| 1419.01 | 562 | — | 3 | 1/2 | |
| 1389.14 | 264 | — | 3 | | |
| 1419.07 | — | — | 3 | 1/3 | |
| 1419.14 | — | — | 3 | 1/3 | |
| 1419.17 | 255 | 4314 | 3 | 2/2 | 2/2 |

[0465] TABLE XXV
DR supermotif and DR3 motif-bearing peptides
cross-reactive binding peptides

| | |
|---|---|
| DR supermotif | DR3 |

| Antigen | Motif+ | Algorithm+* | Motif+ |
|---|---|---|---|
| PAP | 67 | 39/15 | 21 |
| PSM | 45 | 25/7 | 4 |
| PSA | 108 | 54/20 | 31 |
| HuK2 | 45 | 21/6 | 4 |
| Total | 265 | 139/48 | 60 |

*Number scoring positive in the combined DR1, DR4w4 and DR7 algorithms (≧1/≧2)

The application's sequence listing, which the Patent Office published only in electronic form, follows.

SEQUENCE LISTING (6902 sequences)

SEQ ID NO: 1 - protein, 11 aa, Homo sapien
ALFPPEGVSIW

SEQ ID NO: 2 - protein, 11 aa, Homo sapien
ALGTTCYASGW

SEQ ID NO: 3 - protein, 11 aa, Homo sapien
ALGTTCYASGW

SEQ ID NO: 4 - protein, 9 aa, Homo sapien
ALPEKPAVY

SEQ ID NO: 5 - protein, 9 aa, Homo sapien
ALPERPSLY

SEQ ID NO: 6 - protein, 8 aa, Homo sapien
ALVLAGGF

SEQ ID NO: 7 - protein, 9 aa, Homo sapien
ALVLAGGFF

SEQ ID NO: 8 - protein, 9 aa, Homo sapien
AMTNLAALF

SEQ ID NO: 9 - protein, 9 aa, Homo sapien
ASCHLTELY

SEQ ID NO: 10 - protein, 10 aa, Homo sapien
ASCHLTELYF

SEQ ID NO: 11 - protein, 11 aa, Homo sapien
ASGRARYTKNW

SEQ ID NO: 12 - protein, 11 aa, Homo sapien
ASKFSERLQDF

SEQ ID NO: 13 - protein, 9 aa, Homo sapien
ASLSLGFLF

SEQ ID NO: 14 - protein, 8 aa, Homo sapien
ASWDAEEF

SEQ ID NO: 15 - protein, 8 aa, Homo sapien
ATARRPRW

SEQ ID NO: 16 - protein, 10 aa, Homo sapien
AVATARRPRW

SEQ ID NO: 17 - protein, 10 aa, Homo sapien
AVVHEIVRSF

SEQ ID NO: 18 - protein, 9 aa, Homo sapien
AVYTKVVHY

SEQ ID NO: 19 - protein, 9 aa, Homo sapien
CLKKNSQVW

SEQ ID NO: 20 - protein, 10 aa, Homo sapien
CSGKIVIARY

SEQ ID NO: 21 - protein, 10 aa, Homo sapien
CSPSCPLERF

SEQ ID NO: 22 - protein, 9 aa, Homo sapien
DIVPPFSAF

SEQ ID NO: 23 - protein, 10 aa, Homo sapien
DLFGIWSKVY

SEQ ID NO: 24 - protein, 9 aa, Homo sapien
DMSLLKNRF

SEQ ID NO: 25 - protein, 10 aa, Homo sapien
DSLFSAVKNF

SEQ ID NO: 26 - protein, 8 aa, Homo sapien
DSSIEGNY

SEQ ID NO: 27 - protein, 8 aa, Homo sapien
DSVELAHY

SEQ ID NO: 28 - protein, 10 aa, Homo sapien
DVYNGLLPPY

SEQ ID NO: 29 - protein, 8 aa, Homo sapien
EIFNTSLF

SEQ ID NO: 30 - protein, 11 aa, Homo sapien
ELAHYDVLLSY

SEQ ID NO: 31 - protein, 10 aa, Homo sapien
ELANSIVLPF

SEQ ID NO: 32 - protein, 10 aa, Homo sapien
ELGEYIRKRY

SEQ ID NO: 33 - protein, 10 aa, Homo sapien
ELKAENIKKF

SEQ ID NO: 34 - protein, 9 aa, Homo sapien
ELKFVTLVF

SEQ ID NO: 35 - protein, 9 aa, Homo sapien
ELKSPDEGF

SEQ ID NO: 36 - protein, 11 aa, Homo sapien
ELSELSLLSLY

SEQ ID NO: 37 - protein, 8 aa, Homo sapien
ELSLLSLY

SEQ ID NO: 38 - protein, 11 aa, Homo sapien
ELVEKFYDPMF

SEQ ID NO: 39 - protein, 11 aa, Homo sapien
ELVGPVIPQDW

SEQ ID NO: 40 - protein, 9 aa, Homo sapien
ELYFEKGEY

SEQ ID NO: 41 - protein, 10 aa, Homo sapien
ELYFEKGEYF

SEQ ID NO: 42 - protein, 9 aa, Homo sapien
EMKTYSVSF

SEQ ID NO: 43 - protein, 10 aa, Homo sapien
ESETLKSEEF

SEQ ID NO: 44 - protein, 11 aa, Homo sapien
ESFPGIYDALF

SEQ ID NO: 45 - protein, 10 aa, Homo sapien
ESKVDPSKAW

SEQ ID NO: 46 - protein, 8 aa, Homo sapien
ESSWPQGF

SEQ ID NO: 47 - protein, 11 aa, Homo sapien
ESVHNFTLPSW

SEQ ID NO: 48 - protein, 9 aa, Homo sapien
ESYKHEQVY

SEQ ID NO: 49 - protein, 8 aa, Homo sapien
ETLKSEEF

SEQ ID NO: 50 - protein, 8 aa, Homo sapien
ETNKFSGY

SEQ ID NO: 51 - protein, 11 aa, Homo sapien
ETNKFSGYPLY

SEQ ID NO: 52 - protein, 9 aa, Homo sapien
ETYELVEKF

SEQ ID NO: 53 - protein, 10 aa, Homo sapien
ETYELVEKFY

SEQ ID NO: 54 - protein, 11 aa, Homo sapien
EVKRQIYVAAF

SEQ ID NO: 55 - protein, 8 aa, Homo sapien
FLFLLFFW

SEQ ID NO: 56 - protein, 9 aa, Homo sapien
FLLGFLFGW

SEQ ID NO: 57 - protein, 10 aa, Homo sapien
FLLGFLFGWF

SEQ ID NO: 58 - protein, 8 aa, Homo sapien
FLTLSVTW

SEQ ID NO: 59 - protein, 8 aa, Homo sapien
FMLCAGLW

SEQ ID NO: 60 - protein, 8 aa, Homo sapien
FMLCAGRW

SEQ ID NO: 61 - protein, 8 aa, Homo sapien
FSERLQDF

SEQ ID NO: 62 - protein, 11 aa, Homo sapien
FSGYPLYHSVY

SEQ ID NO: 63 - protein, 8 aa, Homo sapien
FTEIASKF

SEQ ID NO: 64 - protein, 9 aa, Homo sapien
GIASGRARY

SEQ ID NO: 65 - protein, 11 aa, Homo sapien
GIWSKVYDPLY

SEQ ID NO: 66 - protein, 10 aa, Homo sapien
GLDSVELAHY

SEQ ID NO: 67 - protein, 8 aa, Homo sapien
GLHGQDLF

SEQ ID NO: 68 - protein, 11 aa, Homo sapien
GLHGQDLFGIW

SEQ ID NO: 69 - protein, 8 aa, Homo sapien
GLLGSTEW

SEQ ID NO: 70 - protein, 8 aa, Homo sapien
GLPDRPFY

SEQ ID NO: 71 - protein, 9 aa, Homo sapien
GLQMALDVY

SEQ ID NO: 72 - protein, 11 aa, Homo sapien
GMEQHYELGEY

SEQ ID NO: 73 - protein, 9 aa, Homo sapien
GMPEGDLVY

SEQ ID NO: 74 - protein, 9 aa, Homo sapien
GSAPPDSSW

SEQ ID NO: 75 - protein, 9 aa, Homo sapien
GSGNDFEVF

SEQ ID NO: 76 - protein, 10 aa, Homo sapien
GSGNDFEVFF

SEQ ID NO: 77 - protein, 8 aa, Homo sapien
GSIEPEEF

SEQ ID NO: 78 - protein, 8 aa, Homo sapien
GSIEPEEF

SEQ ID NO: 79 - protein, 8 aa, Homo sapien
GTLKKEGW

SEQ ID NO: 80 - protein, 9 aa, Homo sapien
GTTCYASGW

SEQ ID NO: 81 - protein, 9 aa, Homo sapien
GTTCYASGW

SEQ ID NO: 82 - protein, 11 aa, Homo sapien
GVILYSDPADY

SEQ ID NO: 83 - protein, 9 aa, Homo sapien
GVKSYPDGW

SEQ ID NO: 84 - protein, 9 aa, Homo sapien
GVLQGITSW

SEQ ID NO: 85 - protein, 9 aa, Homo sapien
GVLQGITSW

SEQ ID NO: 86 - protein, 8 aa, Homo sapien
GVLVHPQW

SEQ ID NO: 87 - protein, 8 aa, Homo sapien
GVLVHPQW

SEQ ID NO: 88 - protein, 11 aa, Homo sapien
GVSIWNPILLW

SEQ ID NO: 89 - protein, 9 aa, Homo sapien
HLAGTEQNF

SEQ ID NO: 90 - protein, 11 aa, Homo sapien
HMKRATQIPSY

SEQ ID NO: 91 - protein, 8 aa, Homo sapien
HSFPHPLY

SEQ ID NO: 92 - protein, 8 aa, Homo sapien
HSFPHPLY

SEQ ID NO: 93 - protein, 10 aa, Homo sapien
HSQPWQVAVY

SEQ ID NO: 94 - protein, 10 aa, Homo sapien
HSTNEVTRIY

SEQ ID NO: 95 - protein, 10 aa, Homo sapien
IINEDGNEIF

SEQ ID NO: 96 - protein, 11 aa, Homo sapien
ILFASWDAEEF

SEQ ID NO: 97 - protein, 9 aa, Homo sapien
ILGGHRDSW

SEQ ID NO: 98 - protein, 11 aa, Homo sapien
ILGGHRDSWVF

SEQ ID NO: 99 - protein, 9 aa, Homo sapien
ILLGRHSLF

SEQ ID NO: 100 - protein, 9 aa, Homo sapien
ILSRIVGGW

SEQ ID NO: 101 - protein, 9 aa, Homo sapien
ILYSDPADY

SEQ ID NO: 102 - protein, 10 aa, Homo sapien
ILYSDPADYF

SEQ ID NO: 103 - protein, 10 aa, Homo sapien
ISKLGSGNDF

SEQ ID NO: 104 - protein, 10 aa, Homo sapien
ITPKHNMKAF

SEQ ID NO: 105 - protein, 10 aa, Homo sapien
IVIARYGKVF

SEQ ID NO: 106 - protein, 10 aa, Homo sapien
IVLPFDCRDY

SEQ ID NO: 107 - protein, 8 aa, Homo sapien
IVPPFSAF

SEQ ID NO: 108 - protein, 11 aa, Homo sapien
KIVIARYGKVF

SEQ ID NO: 109 - protein, 8 aa, Homo sapien
KLGSGNDF

SEQ ID NO: 110 - protein, 11 aa, Homo sapien
KLGSGNDFEVF

SEQ ID NO: 111 - protein, 11 aa, Homo sapien
KLSGLHGQDLF

SEQ ID NO: 112 - protein, 11 aa, Homo sapien
KTYSVSFDSLF

SEQ ID NO: 113 - protein, 8 aa, Homo sapien
KVDPSKAW

SEQ ID NO: 114 - protein, 10 aa, Homo sapien
KVPYNVGPGF

SEQ ID NO: 115 - protein, 8 aa, Homo sapien
KVVHYRKW

SEQ ID NO: 116 - protein, 8 aa, Homo sapien
KVVHYRKW

SEQ ID NO: 117 - protein, 10 aa, Homo sapien
LILSRIVGGW

SEQ ID NO: 118 - protein, 10 aa, Homo sapien
LIQSRIVGGW

SEQ ID NO: 119 - protein, 8 aa, Homo sapien
LLGFLFGW

SEQ ID NO: 120 - protein, 9 aa, Homo sapien
LLGFLFGWF

SEQ ID NO: 121 - protein, 8 aa, Homo sapien
LLGRHSLF

SEQ ID NO: 122 - protein, 9 aa, Homo sapien
LLQERGVAY

SEQ ID NO: 123 - protein, 11 aa, Homo sapien
LLSNDMCARAY

SEQ ID NO: 124 - protein, 8 aa, Homo sapien
LMFLERAF

SEQ ID NO: 125 - protein, 8 aa, Homo sapien
LSEDQLLY

SEQ ID NO: 126 - protein, 11 aa, Homo sapien
LSEDQLLYLPF

SEQ ID NO: 127 - protein, 10 aa, Homo sapien
LSELSLLSLY

SEQ ID NO: 128 - protein, 10 aa, Homo sapien
LSGLHGQDLF

SEQ ID NO: 129 - protein, 10 aa, Homo sapien
LSLGFLFLLF

SEQ ID NO: 130 - protein, 11 aa, Homo sapien
LSLGFLFLLFF

SEQ ID NO: 131 - protein, 10 aa, Homo sapien
LSNDMCARAY

SEQ ID NO: 132 - protein, 8 aa, Homo sapien
LSRIVGGW

SEQ ID NO: 133 - protein, 11 aa, Homo sapien
LSYPNKTHPNY

SEQ ID NO: 134 - protein, 11 aa, Homo sapien
LTELYFEKGEY

SEQ ID NO: 135 - protein, 10 aa, Homo sapien
LTPGYPANEY

SEQ ID NO: 136 - protein, 10 aa, Homo sapien
LTQLGMEQHY

SEQ ID NO: 137 - protein, 10 aa, Homo sapien
LVEKFYDPMF

SEQ ID NO: 138 - protein, 10 aa, Homo sapien
LVGPVIPQDW

SEQ ID NO: 139 - protein, 8 aa, Homo sapien
LVLAGGFF

SEQ ID NO: 140 - protein, 8 aa, Homo sapien
MMNDQLMF

SEQ ID NO: 141 - protein, 11 aa, Homo sapien
MSAMTNLAALF

SEQ ID NO: 142 - protein, 8 aa, Homo sapien
MSLLKNRF

SEQ ID NO: 143 - protein, 8 aa, Homo sapien
MTNLAALF

SEQ ID NO: 144 - protein, 9 aa, Homo sapien
NIKKFLYNF

SEQ ID NO: 145 - protein, 11 aa, Homo sapien
NITPKHNMKAF

SEQ ID NO: 146 - protein, 10 aa, Homo sapien
NVGPGFTGNF

SEQ ID NO: 147 - protein, 9 aa, Homo sapien
NVSDIVPPF

SEQ ID NO: 148 - protein, 11 aa, Homo sapien
PIKESSWPQGF

SEQ ID NO: 149 - protein, 9 aa, Homo sapien
PLGLPDRPF

SEQ ID NO: 150 - protein, 10 aa, Homo sapien
PLGLPDRPFY

SEQ ID NO: 151 - protein, 11 aa, Homo sapien
PLILSRIVGGW

SEQ ID NO: 152 - protein, 11 aa, Homo sapien
PLIQSRIVGGW

SEQ ID NO: 153 - protein, 9 aa, Homo sapien
PLSEDQLLY

SEQ ID NO: 154 - protein, 11 aa, Homo sapien
PLTPGYPANEY

SEQ ID NO: 155 - protein, 10 aa, Homo sapien
PLYCESVHNF

SEQ ID NO: 156 - protein, 10 aa, Homo sapien
PLYHSVYETY

SEQ ID NO: 157 - protein, 8 aa, Homo sapien
PSCPLERF

SEQ ID NO: 158 - protein, 10 aa, Homo sapien
PSIPVHPIGY

SEQ ID NO: 159 - protein, 11 aa, Homo sapien
PSIPVHPIGYY

SEQ ID NO: 160 - protein, 10 aa, Homo sapien
PSLYTKVVHY

SEQ ID NO: 161 - protein, 9 aa, Homo sapien
PSYKKLIMY

SEQ ID NO: 162 - protein, 10 aa, Homo sapien
PTDPIKESSW

SEQ ID NO: 163 - protein, 8 aa, Homo sapien
PVHPIGYY

SEQ ID NO: 164 - protein, 11 aa, Homo sapien
PVSHSFPHPLY

SEQ ID NO: 165 - protein, 11 aa, Homo sapien
QIPSYKKLIMY

SEQ ID NO: 166 - protein, 9 aa, Homo sapien
QIQSQWKEF

SEQ ID NO: 167 - protein, 11 aa, Homo sapien
QLAGAKGVILY

SEQ ID NO: 168 - protein, 10 aa, Homo sapien
QLAKQIQSQW

SEQ ID NO: 169 - protein, 8 aa, Homo sapien
QLGMEQHY

SEQ ID NO: 170 - protein, 9 aa, Homo sapien
QLMFLERAF

SEQ ID NO: 171 - protein, 11 aa, Homo sapien
QLTQLGMEQHY

SEQ ID NO: 172 - protein, 8 aa, Homo sapien
QSRIVGGW

SEQ ID NO: 173 - protein, 9 aa, Homo sapien
QVAVYSHGW

SEQ ID NO: 174 - protein, 9 aa, Homo sapien
QVFQVSHSF

SEQ ID NO: 175 - protein, 10 aa, Homo sapien
QVHPQKVTKF

SEQ ID NO: 176 - protein, 8 aa, Homo sapien
QVRGGMVF

SEQ ID NO: 177 - protein, 11 aa, Homo sapien
QVSHSFPHPLY

SEQ ID NO: 178 - protein, 10 aa, Homo sapien
QVWLGRHNLF

SEQ ID NO: 179 - protein, 11 aa, Homo sapien
RISKLGSGNDF

SEQ ID NO: 180 - protein, 11 aa, Homo sapien
RLGIASGRARY

SEQ ID NO: 181 - protein, 8 aa, Homo sapien
RLHPYKDF

SEQ ID NO: 182 - protein, 10 aa, Homo sapien
RLLQERGVAY

SEQ ID NO: 183 - protein, 9 aa, Homo sapien
RMMNDQLMF

SEQ ID NO: 184 - protein, 11 aa, Homo sapien
RSFGTLKKEGW

SEQ ID NO: 185 - protein, 10 aa, Homo sapien
RSVLAKELKF

SEQ ID NO: 186 - protein, 8 aa, Homo sapien
RTILFASW

SEQ ID NO: 187 - protein, 9 aa, Homo sapien
RVDCTPLMY

SEQ ID NO: 188 - protein, 8 aa, Homo sapien
RVPVSHSF

SEQ ID NO: 189 - protein, 11 aa, Homo sapien
SIINEDGNEIF

SEQ ID NO: 190 - protein, 9 aa, Homo sapien
SIPVHPIGY

SEQ ID NO: 191 - protein, 10 aa, Homo sapien
SIPVHPIGYY

SEQ ID NO: 192 - protein, 11 aa, Homo sapien
SIVLPFDCRDY

SEQ ID NO: 193 - protein, 9 aa, Homo sapien
SIWNPILLW

SEQ ID NO: 194 - protein, 10 aa, Homo sapien
SLFEPPPPGY

SEQ ID NO: 195 - protein, 9 aa, Homo sapien
SLFSAVKNF

SEQ ID NO: 196 - protein, 9 aa, Homo sapien
SLGFLFLLF

SEQ ID NO: 197 - protein, 10 aa, Homo sapien
SLGFLFLLFF

SEQ ID NO: 198 - protein, 11 aa, Homo sapien
SLGFLFLLFFW

SEQ ID NO: 199 - protein, 8 aa, Homo sapien
SLSLGFLF

SEQ ID NO: 200 - protein, 11 aa, Homo sapien
SLSLGFLFLLF

SEQ ID NO: 201 - protein, 9 aa, Homo sapien
SLYTKVVHY

SEQ ID NO: 202 - protein, 11 aa, Homo sapien
SMKHPQEMKTY

SEQ ID NO: 203 - protein, 11 aa, Homo sapien
SSHNKYAGESF

SEQ ID NO: 204 - protein, 11 aa, Homo sapien
SSWRGSLKVPY

SEQ ID NO: 205 - protein, 9 aa, Homo sapien
STNEVTRIY

SEQ ID NO: 206 - protein, 10 aa, Homo sapien
SVHNFTLPSW

SEQ ID NO: 207 - protein, 11 aa, Homo sapien
SVILLGRHSLF

SEQ ID NO: 208 - protein, 9 aa, Homo sapien
SVLAKELKF

SEQ ID NO: 209 - protein, 8 aa, Homo sapien
SVSFDSLF

SEQ ID NO: 210 - protein, 11 aa, Homo sapien
TLRGAVEPDRY

SEQ ID NO: 211 - protein, 11 aa, Homo sapien
TLRVDCTPLMY

SEQ ID NO: 212 - protein, 11 aa, Homo sapien
TSLFEPPPPGY

SEQ ID NO: 213 - protein, 8 aa, Homo sapien
TTCYASGW

SEQ ID NO: 214 - protein, 8 aa, Homo sapien
TTCYASGW

SEQ ID NO: 215 - protein, 11 aa, Homo sapien
TVAQVRGGMVF

SEQ ID NO: 216 - protein, 11 aa, Homo sapien
TVPLSEDQLLY

SEQ ID NO: 217 - protein, 9 aa, Homo sapien
VIARYGKVF

SEQ ID NO: 218 - protein, 10 aa, Homo sapien
VILGGHRDSW

SEQ ID NO: 219 - protein, 10 aa, Homo sapien
VILLGRHSLF

SEQ ID NO: 220 - protein, 10 aa, Homo sapien
VILYSDPADY

SEQ ID NO: 221 - protein, 11 aa, Homo sapien
VILYSDPADYF

SEQ ID NO: 222 - protein, 11 aa, Homo sapien
VIYAPSSHNKY

SEQ ID NO: 223 - protein, 11 aa, Homo sapien
VLAGGFFLLGF

SEQ ID NO: 224 - protein, 8 aa, Homo sapien
VLAKELKF

SEQ ID NO: 225 - protein, 9 aa, Homo sapien
VLPFDCRDY

SEQ ID NO: 226 - protein, 8 aa, Homo sapien
VLQGITSW

SEQ ID NO: 227 - protein, 8 aa, Homo sapien
VLQGITSW

SEQ ID NO: 228 - protein, 10 aa, Homo sapien
VLRKYADKIY

SEQ ID NO: 229 - protein, 11 aa, Homo sapien
VLRMMNDQLMF

SEQ ID NO: 230 - protein, 8 aa, Homo sapien
VSDIVPPF

SEQ ID NO: 231 - protein, 11 aa, Homo sapien
VSDIVPPFSAF

SEQ ID NO: 232 - protein, 11 aa, Homo sapien
VSGLQMALDVY

SEQ ID NO: 233 - protein, 10 aa, Homo sapien
VSHSFPHPLY

SEQ ID NO: 234 - protein, 10 aa, Homo sapien
VSHSFPHPLY

SEQ ID NO: 235 - protein, 10 aa, Homo sapien
VSIWNPILLW

SEQ ID NO: 236 - protein, 11 aa, Homo sapien
VTEFMLCAGLW

SEQ ID NO: 237 - protein, 11 aa, Homo sapien
VTKFMLCAGRW

SEQ ID NO: 238 - protein, 10 aa, Homo sapien
VVFLTLSVTW

SEQ ID NO: 239 - protein, 9 aa, Homo sapien
VVHEIVRSF

SEQ ID NO: 240 - protein, 11 aa, Homo sapien
VVLRKYADKIY

SEQ ID NO: 241 - protein, 8 aa, Homo sapien
WLGRHNLF

SEQ ID NO: 242 - protein, 9 aa, Homo sapien
WSKVYDPLY

SEQ ID NO: 243 - protein, 10 aa, Homo sapien
WTKKSPSPEF

SEQ ID NO: 244 - protein, 9 aa, Homo sapien
YIRKRYRKF

SEQ ID NO: 245 - protein, 10 aa, Homo sapien
YLPFRNCPRF

SEQ ID NO: 246 - protein, 8 aa, Homo sapien
YSDPADYF

SEQ ID NO: 247 - protein, 8 aa, Homo sapien
YSEKVTEF

SEQ ID NO: 248 - protein, 9 aa, Homo sapien
YSVSFDSLF

SEQ ID NO: 249 - protein, 10 aa, Homo sapien
YTKNWETNKF

SEQ ID NO: 250 - protein, 10 aa, Homo sapien
YTKVVHYRKW

SEQ ID NO: 251 - protein, 10 aa, Homo sapien
YTKVVHYRKW

SEQ ID NO: 252 - protein, 11 aa, Homo sapien
YVILGGHRDSW

SEQ ID NO: 253 - protein, 10 aa, Homo sapien
YVNYARTEDF

SEQ ID NO: 254 - protein, 11 aa, Homo sapien
YVNYARTEDFF

SEQ ID NO: 255 - protein, 9 aa, Homo sapien
AAAETLSEV

SEQ ID NO: 256 - protein, 10 aa, Homo sapien
AAAETLSEVA

SEQ ID NO: 257 - protein, 8 aa, Homo sapien
AAETLSEV

SEQ ID NO: 258 - protein, 9 aa, Homo sapien
AAETLSEVA

SEQ ID NO: 259 - protein, 8 aa, Homo sapien
AAFTVQAA

SEQ ID NO: 260 - protein, 9 aa, Homo sapien
AAFTVQAAA

SEQ ID NO: 261 - protein, 11 aa, Homo sapien
AAFTVQAAAET

SEQ ID NO: 262 - protein, 10 aa, Homo sapien
AAHCIRNKSV

SEQ ID NO: 263 - protein, 11 aa, Homo sapien
AAHCIRNKSVI

SEQ ID NO: 264 - protein, 11 aa, Homo sapien
AAHCLKKNSQV

SEQ ID NO: 265 - protein, 9 aa, Homo sapien
AALFPPEGV

SEQ ID NO: 266 - protein, 11 aa, Homo sapien
AALFPPEGVSI

SEQ ID NO: 267 - protein, 9 aa, Homo sapien
AAPLILSRI

SEQ ID NO: 268 - protein, 10 aa, Homo sapien
AAPLILSRIV

SEQ ID NO: 269 - protein, 9 aa, Homo sapien
AAPLLLARA

SEQ ID NO: 270 - protein, 10 aa, Homo sapien
AAPLLLARAA

SEQ ID NO: 271 - protein, 9 aa, Homo sapien
AASLSLGFL

SEQ ID NO: 272 - protein, 11 aa, Homo sapien
AASLSLGFLFL

SEQ ID NO: 273 - protein, 8 aa, Homo sapien
AAVVHEIV

SEQ ID NO: 274 - protein, 8 aa, Homo sapien
ALDVYNGL

SEQ ID NO: 275 - protein, 9 aa, Homo sapien
ALDVYNGLL

SEQ ID NO: 276 - protein, 9 aa, Homo sapien
ALFDIESKV

SEQ ID NO: 277 - protein, 8 aa, Homo sapien
ALFPPEGV

SEQ ID NO: 278 - protein, 10 aa, Homo sapien
ALFPPEGVSI

SEQ ID NO: 279 - protein, 8 aa, Homo sapien
ALGTTCYA

SEQ ID NO: 280 - protein, 8 aa, Homo sapien
ALGTTCYA

SEQ ID NO: 281 - protein, 8 aa, Homo sapien
ALPEKPAV

SEQ ID NO: 282 - protein, 10 aa, Homo sapien
ALPEKPAVYT

SEQ ID NO: 283 - protein, 8 aa, Homo sapien
ALPERPSL

SEQ ID NO: 284 - protein, 10 aa, Homo sapien
ALPERPSLYT

SEQ ID NO: 285 - protein, 9 aa, Homo sapien
ALSVGCTGA

SEQ ID NO: 286 - protein, 10 aa, Homo sapien
ALSVGCTGAV

SEQ ID NO: 287 - protein, 10 aa, Homo sapien
ALVLAGGFFL

SEQ ID NO: 288 - protein, 11 aa, Homo sapien
ALVLAGGFFLL

SEQ ID NO: 289 - protein, 8 aa, Homo sapien
AMTNLAAL

SEQ ID NO: 290 - protein, 8 aa, Homo sapien
AQKLLEKM

SEQ ID NO: 291 - protein, 9 aa, Homo sapien
AQLAGAKGV

SEQ ID NO: 292 - protein, 10 aa, Homo sapien
AQLAGAKGVI

SEQ ID NO: 293 - protein, 11 aa, Homo sapien
AQLAGAKGVIL

SEQ ID NO: 294 - protein, 8 aa, Homo sapien
AQVHPQKV

SEQ ID NO: 295 - protein, 9 aa, Homo sapien
AQVHPQKVT

SEQ ID NO: 296 - protein, 8 aa, Homo sapien
AQVRGGMV

SEQ ID NO: 297 - protein, 11 aa, Homo sapien
AQVRGGMVFEL

SEQ ID NO: 298 - protein, 9 aa, Homo sapien
ATARRPRWL

SEQ ID NO: 299 - protein, 11 aa, Homo sapien
ATARRPRWLCA

SEQ ID NO: 300 - protein, 9 aa, Homo sapien
ATEDTMTKL

SEQ ID NO: 301 - protein, 9 aa, Homo sapien
ATLGKLSGL

SEQ ID NO: 302 - protein, 10 aa, Homo sapien
ATNITPKHNM

SEQ ID NO: 303 - protein, 10 aa, Homo sapien
ATQIPSYKKL

SEQ ID NO: 304 - protein, 11 aa, Homo sapien
ATQIPSYKKLI

SEQ ID NO: 305 - protein, 11 aa, Homo sapien
AVATARRPRWL

SEQ ID NO: 306 - protein, 8 aa, Homo sapien
AVCGGVLV

SEQ ID NO: 307 - protein, 8 aa, Homo sapien
AVEPDRYV

SEQ ID NO: 308 - protein, 9 aa, Homo sapien
AVEPDRYVI

SEQ ID NO: 309 - protein, 10 aa, Homo sapien
AVEPDRYVIL

SEQ ID NO: 310 - protein, 9 aa, Homo sapien
AVGLPSIPV

SEQ ID NO: 311 - protein, 8 aa, Homo sapien
AVKNFTEI

SEQ ID NO: 312 - protein, 9 aa, Homo sapien
AVKNFTEIA

SEQ ID NO: 313 - protein, 9 aa, Homo sapien
AVKVMDLPT

SEQ ID NO: 314 - protein, 9 aa, Homo sapien
AVPLIQSRI

SEQ ID NO: 315 - protein, 10 aa, Homo sapien
AVPLIQSRIV

SEQ ID NO: 316 - protein, 8 aa, Homo sapien
AVVLRKYA

SEQ ID NO: 317 - protein, 11 aa, Homo sapien
AVVLRKYADKI

SEQ ID NO: 318 - protein, 8 aa, Homo sapien
AVYSHGWA

SEQ ID NO: 319 - protein, 8 aa, Homo sapien
CAGALVLA

SEQ ID NO: 320 - protein, 11 aa, Homo sapien
CAGLWTGGKDT

SEQ ID NO: 321 - protein, 11 aa, Homo sapien
CAGRWTGGKST

SEQ ID NO: 322 - protein, 8 aa, Homo sapien
CALPEKPA

SEQ ID NO: 323 - protein, 9 aa, Homo sapien
CALPEKPAV

SEQ ID NO: 324 - protein, 11 aa, Homo sapien
CALPEKPAVYT

SEQ ID NO: 325 - protein, 9 aa, Homo sapien
CALPERPSL

SEQ ID NO: 326 - protein, 11 aa, Homo sapien
CALPERPSLYT

SEQ ID NO: 327 - protein, 9 aa, Homo sapien
CAQVHPQKV

SEQ ID NO: 328 - protein, 10 aa, Homo sapien
CAQVHPQKVT

SEQ ID NO: 329 - protein, 9 aa, Homo sapien
CARAYSEKV

SEQ ID NO: 330 - protein, 10 aa, Homo sapien
CARAYSEKVT

SEQ ID NO: 331 - protein, 8 aa, Homo sapien
CIRNKSVI

SEQ ID NO: 332 - protein, 9 aa, Homo sapien
CIRNKSVIL

SEQ ID NO: 333 - protein, 10 aa, Homo sapien
CIRNKSVILL

SEQ ID NO: 334 - protein, 8 aa, Homo sapien
CLKKNSQV

SEQ ID NO: 335 - protein, 10 aa, Homo sapien
CLKKNSQVWL

SEQ ID NO: 336 - protein, 10 aa, Homo sapien
CMTTNSHQGT

SEQ ID NO: 337 - protein, 8 aa, Homo sapien
CTGAVPLI

SEQ ID NO: 338 - protein, 8 aa, Homo sapien
CTPLMYSL

SEQ ID NO: 339 - protein, 9 aa, Homo sapien
CTPLMYSLV

SEQ ID NO: 340 - protein, 11 aa, Homo sapien
CVDLHVISNDV

SEQ ID NO: 341 - protein, 11 aa, Homo sapien
CVSLHLLSNDM

SEQ ID NO: 342 - protein, 8 aa, Homo sapien
DAEEFGLL

SEQ ID NO: 343 - protein, 11 aa, Homo sapien
DAEEFGLLGST

SEQ ID NO: 344 - protein, 10 aa, Homo sapien
DALFDIESKV

SEQ ID NO: 345 - protein, 9 aa, Homo sapien
DAQKLLEKM

SEQ ID NO: 346 - protein, 8 aa, Homo sapien
DAVKVMDL

SEQ ID NO: 347 - protein, 10 aa, Homo sapien
DAVKVMDLPT

SEQ ID NO: 348 - protein, 11 aa, Homo sapien
DIESKVDPSKA

SEQ ID NO: 349 - protein, 8 aa, Homo sapien
DIVPPFSA

SEQ ID NO: 350 - protein, 9 aa, Homo sapien
DLFGIWSKV

SEQ ID NO: 351 - protein, 9 aa, Homo sapien
DLHVISNDV

SEQ ID NO: 352 - protein, 11 aa, Homo sapien
DLHVISNDVCA

SEQ ID NO: 353 - protein, 11 aa, Homo sapien
DLMLLRLSEPA

SEQ ID NO: 354 - protein, 11 aa, Homo sapien
DLMLLRLSEPA

SEQ ID NO: 355 - protein, 8 aa, Homo sapien
DLPTQEPA

SEQ ID NO: 356 - protein, 9 aa, Homo sapien
DLPTQEPAL

SEQ ID NO: 357 - protein, 11 aa, Homo sapien
DLPTQEPALGT

SEQ ID NO: 358 - protein, 8 aa, Homo sapien
DLVLSIAL

SEQ ID NO: 359 - protein, 10 aa, Homo sapien
DLVLSIALSV

SEQ ID NO: 360 - protein, 8 aa, Homo sapien
DLVYVNYA

SEQ ID NO: 361 - protein, 10 aa, Homo sapien
DLVYVNYART

SEQ ID NO: 362 - protein, 11 aa, Homo sapien
DMCARAYSEKV

SEQ ID NO: 363 - protein, 10 aa, Homo sapien
DMKINCSGKI

SEQ ID NO: 364 - protein, 11 aa, Homo sapien
DMKINCSGKIV

SEQ ID NO: 365 - protein, 10 aa, Homo sapien
DMSLLKNRFL

SEQ ID NO: 366 - protein, 9 aa, Homo sapien
DQLMFLERA

SEQ ID NO: 367 - protein, 11 aa, Homo sapien
DQLMFLERAFI

SEQ ID NO: 368 - protein, 11 aa, Homo sapien
DTCGGDSGGPL

SEQ ID NO: 369 - protein, 8 aa, Homo sapien
DTFPTDPI

SEQ ID NO: 370 - protein, 8 aa, Homo sapien
DTGQRVPV

SEQ ID NO: 371 - protein, 8 aa, Homo sapien
DTGQVFQV

SEQ ID NO: 372 - protein, 9 aa, Homo sapien
DTMTKLREL

SEQ ID NO: 373 - protein, 9 aa, Homo sapien
DTTVSGLQM

SEQ ID NO: 374 - protein, 10 aa, Homo sapien
DTTVSGLQMA

SEQ ID NO: 375 - protein, 11 aa, Homo sapien
DTTVSGLQMAL

SEQ ID NO: 376 - protein, 11 aa, Homo sapien
DVCAQVHPQKV

SEQ ID NO: 377 - protein, 9 aa, Homo sapien
DVDRTLMSA

SEQ ID NO: 378 - protein, 10 aa, Homo sapien
DVDRTLMSAM

SEQ ID NO: 379 - protein, 11 aa, Homo sapien
DVDRTLMSAMT

SEQ ID NO: 380 - protein, 10 aa, Homo sapien
DVLLSYPNKT

SEQ ID NO: 381 - protein, 8 aa, Homo sapien
DVVKVLGL

SEQ ID NO: 382 - protein, 10 aa, Homo sapien
DVVKVLGLPT

SEQ ID NO: 383 - protein, 11 aa, Homo sapien
DVYNGLLPPYA

SEQ ID NO: 384 - protein, 11 aa, Homo sapien
EATNITPKHNM

SEQ ID NO: 385 - protein, 8 aa, Homo sapien
EAVGLPSI

SEQ ID NO: 386 - protein, 10 aa, Homo sapien
EAVGLPSIPV

SEQ ID NO: 387 - protein, 10 aa, Homo sapien
EIASKFSERL

SEQ ID NO: 388 - protein, 9 aa, Homo sapien
EILNHMKRA

SEQ ID NO: 389 - protein, 10 aa, Homo sapien
EILNHMKRAT

SEQ ID NO: 390 - protein, 8 aa, Homo sapien
EIVRSFGT

SEQ ID NO: 391 - protein, 9 aa, Homo sapien
EIVRSFGTL

SEQ ID NO: 392 - protein, 8 aa, Homo sapien
ELAHYDVL

SEQ ID NO: 393 - protein, 9 aa, Homo sapien
ELAHYDVLL

SEQ ID NO: 394 - protein, 8 aa, Homo sapien
ELANSIVL

SEQ ID NO: 395 - protein, 11 aa, Homo sapien
ELKAENIKKFL

SEQ ID NO: 396 - protein, 8 aa, Homo sapien
ELKFVTLV

SEQ ID NO: 397 - protein, 8 aa, Homo sapien
ELSELSLL

SEQ ID NO: 398 - protein, 10 aa, Homo sapien
ELSELSLLSL

SEQ ID NO: 399 - protein, 10 aa, Homo sapien
ELSLLSLYGI

SEQ ID NO: 400 - protein, 8 aa, Homo sapien
ELTDAVKV

SEQ ID NO: 401 - protein, 9 aa, Homo sapien
ELTDAVKVM

SEQ ID NO: 402 - protein, 11 aa, Homo sapien
ELTDAVKVMDL

SEQ ID NO: 403 - protein, 10 aa, Homo sapien
ELVEKFYDPM

SEQ ID NO: 404 - protein, 11 aa, Homo sapien
ELYFEKGEYFV

SEQ ID NO: 405 - protein, 8 aa, Homo sapien
EMYYRNET

SEQ ID NO: 406 - protein, 10 aa, Homo sapien
EQHYELGEYI

SEQ ID NO: 407 - protein, 10 aa, Homo sapien
EQNFQLAKQI

SEQ ID NO: 408 - protein, 8 aa, Homo sapien
EQVYIRST

SEQ ID NO: 409 - protein, 10 aa, Homo sapien
EQVYIRSTDV

SEQ ID NO: 410 - protein, 8 aa, Homo sapien
ETDSAVAT

SEQ ID NO: 411 - protein, 9 aa, Homo sapien
ETDSAVATA

SEQ ID NO: 412 - protein, 10 aa, Homo sapien
ETNKFSGYPL

SEQ ID NO: 413 - protein, 9 aa, Homo sapien
ETQHEPYPL

SEQ ID NO: 414 - protein, 10 aa, Homo sapien
ETQHEPYPLM

SEQ ID NO: 415 - protein, 11 aa, Homo sapien
ETQHEPYPLML

SEQ ID NO: 416 - protein, 9 aa, Homo sapien
EVFFQRLGI

SEQ ID NO: 417 - protein, 10 aa, Homo sapien
EVFFQRLGIA

SEQ ID NO: 418 - protein, 8 aa, Homo sapien
EVKRQIYV

SEQ ID NO: 419 - protein, 9 aa, Homo sapien
EVKRQIYVA

SEQ ID NO: 420 - protein, 10 aa, Homo sapien
EVKRQIYVAA

SEQ ID NO: 421 - protein, 8 aa, Homo sapien
EVTRIYNV

SEQ ID NO: 422 - protein, 9 aa, Homo sapien
EVTRIYNVI

SEQ ID NO: 423 - protein, 11 aa, Homo sapien
EVTRIYNVIGT

SEQ ID NO: 424 - protein, 8 aa, Homo sapien
FAELVGPV

SEQ ID NO: 425 - protein, 9 aa, Homo sapien
FAELVGPVI

SEQ ID NO: 426 - protein, 11 aa, Homo sapien
FASWDAEEFGL

SEQ ID NO: 427 - protein, 8 aa, Homo sapien
FIATLGKL

SEQ ID NO: 428 - protein, 11 aa, Homo sapien
FIATLGKLSGL

SEQ ID NO: 429 - protein, 8 aa, Homo sapien
FIKSSNEA

SEQ ID NO: 430 - protein, 9 aa, Homo sapien
FIKSSNEAT

SEQ ID NO: 431 - protein, 11 aa, Homo sapien
FIKSSNEATNI

SEQ ID NO: 432 - protein, 10 aa, Homo sapien
FLDELKAENI

SEQ ID NO: 433 - protein, 10 aa, Homo sapien
FLERAFIDPL

SEQ ID NO: 434 - protein, 9 aa, Homo sapien
FLFLLFFWL

SEQ ID NO: 435 - protein, 11 aa, Homo sapien
FLLFFWLDRSV

SEQ ID NO: 436 - protein, 11 aa, Homo sapien
FLLGFLFGWFI

SEQ ID NO: 437 - protein, 11 aa, Homo sapien
FLNESYKHEQV

SEQ ID NO: 438 - protein, 10 aa, Homo sapien
FLRPRSLQCV

SEQ ID NO: 439 - protein, 9 aa, Homo sapien
FLTLSVTWI

SEQ ID NO: 440 - protein, 11 aa, Homo sapien
FLTLSVTWIGA

SEQ ID NO: 441 - protein, 10 aa, Homo sapien
FLTPKKLQCV

SEQ ID NO: 442 - protein, 8 aa, Homo sapien
FLYNFTQI

SEQ ID NO: 443 - protein, 11 aa, Homo sapien
FLYNFTQIPHL

SEQ ID NO: 444 - protein, 9 aa, Homo sapien
FMLCAGLWT

SEQ ID NO: 445 - protein, 9 aa, Homo sapien
FMLCAGRWT

SEQ ID NO: 446 - protein, 8 aa, Homo sapien
FQELESET

SEQ ID NO: 447 - protein, 9 aa, Homo sapien
FQELESETL

SEQ ID NO: 448 - protein, 11 aa, Homo sapien
FQRLGIASGRA

SEQ ID NO: 449 - protein, 11 aa, Homo sapien
FQVSHSFPHPL

SEQ ID NO: 450 - protein, 10 aa, Homo sapien
FTGNFSTQKV

SEQ ID NO: 451 - protein, 8 aa, Homo sapien
FTLPSWAT

SEQ ID NO: 452 - protein, 11 aa, Homo sapien
FTLPSWATEDT

SEQ ID NO: 453 - protein, 8 aa, Homo sapien
FTQIPHLA

SEQ ID NO: 454 - protein, 10 aa, Homo sapien
FTQIPHLAGT

SEQ ID NO: 455 - protein, 9 aa, Homo sapien
FTVQAAAET

SEQ ID NO: 456 - protein, 10 aa, Homo sapien
FTVQAAAETL

SEQ ID NO: 457 - protein, 10 aa, Homo sapien
FVEMYYRNET

SEQ ID NO: 458 - protein, 10 aa, Homo sapien
GAAPLILSRI

SEQ ID NO: 459 - protein, 11 aa, Homo sapien
GAAPLILSRIV

SEQ ID NO: 460 - protein, 8 aa, Homo sapien
GAAVVHEI

SEQ ID NO: 461 - protein, 9 aa, Homo sapien
GAAVVHEIV

SEQ ID NO: 462 - protein, 11 aa, Homo sapien
GALVLAGGFFL

SEQ ID NO: 463 - protein, 9 aa, Homo sapien
GAVEPDRYV

SEQ ID NO: 464 - protein, 10 aa, Homo sapien
GAVEPDRYVI

SEQ ID NO: 465 - protein, 11 aa, Homo sapien
GAVEPDRYVIL

SEQ ID NO: 466 - protein, 10 aa, Homo sapien
GAVPLIQSRI

SEQ ID NO: 467 - protein, 11 aa, Homo sapien
GAVPLIQSRIV

SEQ ID NO: 468 - protein, 8 aa, Homo sapien
GIAEAVGL

SEQ ID NO: 469 - protein, 11 aa, Homo sapien
GIAEAVGLPSI

SEQ ID NO: 470 - protein, 10 aa, Homo sapien
GIASGRARYT

SEQ ID NO: 471 - protein, 8 aa, Homo sapien
GIDPQSGA

SEQ ID NO: 472 - protein, 9 aa, Homo sapien
GIDPQSGAA

SEQ ID NO: 473 - protein, 10 aa, Homo sapien
GIDPQSGAAV

SEQ ID NO: 474 - protein, 11 aa, Homo sapien
GIDPQSGAAVV

SEQ ID NO: 475 - protein, 11 aa, Homo sapien
GIHKQKEKSRL

SEQ ID NO: 476 - protein, 11 aa, Homo sapien
GITSWGPEPCA

SEQ ID NO: 477 - protein, 11 aa, Homo sapien
GITSWGSEPCA

SEQ ID NO: 478 - protein, 10 aa, Homo sapien
GIWSKVYDPL

SEQ ID NO: 479 - protein, 9 aa, Homo sapien
GIYDALFDI

SEQ ID NO: 480 - protein, 8 aa, Homo sapien
GLDSVELA

SEQ ID NO: 481 - protein, 10 aa, Homo sapien
GLHGQDLFGI

SEQ ID NO: 482 - protein, 9 aa, Homo sapien
GLLGSTEWA

SEQ ID NO: 483 - protein, 11 aa, Homo sapien
GLLPPYASCHL

SEQ ID NO: 484 - protein, 11 aa, Homo sapien
GLPDRPFYRHV

SEQ ID NO: 485 - protein, 10 aa, Homo sapien
GLPSIPVHPI

SEQ ID NO: 486 - protein, 8 aa, Homo sapien
GLPTQEPA

SEQ ID NO: 487 - protein, 9 aa, Homo sapien
GLPTQEPAL

SEQ ID NO: 488 - protein, 11 aa, Homo sapien
GLPTQEPALGT

SEQ ID NO: 489 - protein, 8 aa, Homo sapien
GLQMALDV

SEQ ID NO: 490 - protein, 9 aa, Homo sapien
GLWTGGKDT

SEQ ID NO: 491 - protein, 8 aa, Homo sapien
GMEQHYEL

SEQ ID NO: 492 - protein, 8 aa, Homo sapien
GMPEGDLV

SEQ ID NO: 493 - protein, 10 aa, Homo sapien
GMPEGDLVYV

SEQ ID NO: 494 - protein, 8 aa, Homo sapien
GMPRISKL

SEQ ID NO: 495 - protein, 10 aa, Homo sapien
GMVFELANSI

SEQ ID NO: 496 - protein, 11 aa, Homo sapien
GMVFELANSIV

SEQ ID NO: 497 - protein, 11 aa, Homo sapien
GQDLFGIWSKV

SEQ ID NO: 498 - protein, 8 aa, Homo sapien
GQLTQLGM

SEQ ID NO: 499 - protein, 8 aa, Homo sapien
GTEQNFQL

SEQ ID NO: 500 - protein, 9 aa, Homo sapien
GTEQNFQLA

SEQ ID NO: 501 - protein, 11 aa, Homo sapien
GVAYINADSSI

SEQ ID NO: 502 - protein, 9 aa, Homo sapien
GVILYSDPA

SEQ ID NO: 503 - protein, 11 aa, Homo sapien
GVKSYPDGWNL

SEQ ID NO: 504 - protein, 9 aa, Homo sapien
GVLVHPQWV

SEQ ID NO: 505 - protein, 9 aa, Homo sapien
GVLVHPQWV

SEQ ID NO: 506 - protein, 10 aa, Homo sapien
GVLVHPQWVL

SEQ ID NO: 507 - protein, 10 aa, Homo sapien
GVLVHPQWVL

SEQ ID NO: 508 - protein, 11 aa, Homo sapien
GVLVHPQWVLT

SEQ ID NO: 509 - protein, 11 aa, Homo sapien
GVLVHPQWVLT

SEQ ID NO: 510 - protein, 8 aa, Homo sapien
GVLVNEIL

SEQ ID NO: 511 - protein, 11 aa, Homo sapien
GVLVNEILNHM

SEQ ID NO: 512 - protein, 8 aa, Homo sapien
GVQRGNIL

SEQ ID NO: 513 - protein, 10 aa, Homo sapien
GVQRGNILNL

SEQ ID NO: 514 - protein, 8 aa, Homo sapien
GVSIWNPI

SEQ ID NO: 515 - protein, 9 aa, Homo sapien
GVSIWNPIL

SEQ ID NO: 516 - protein, 10 aa, Homo sapien
GVSIWNPILL

SEQ ID NO: 517 - protein, 8 aa, Homo sapien
HIHSTNEV

SEQ ID NO: 518 - protein, 9 aa, Homo sapien
HIHSTNEVT

SEQ ID NO: 519 - protein, 11 aa, Homo sapien
HIHSTNEVTRI

SEQ ID NO: 520 - protein, 11 aa, Homo sapien
HLAGTEQNFQL

SEQ ID NO: 521 - protein, 9 aa, Homo sapien
HLLSNDMCA

SEQ ID NO: 522 - protein, 11 aa, Homo sapien
HLLSNDMCARA

SEQ ID NO: 523 - protein, 11 aa, Homo sapien
HLTVAQVRGGM

SEQ ID NO: 524 - protein, 8 aa, Homo sapien
HMKRATQI

SEQ ID NO: 525 - protein, 8 aa, Homo sapien
HQGTEDST

SEQ ID NO: 526 - protein, 10 aa, Homo sapien
HTVPLSEDQL

SEQ ID NO: 527 - protein, 11 aa, Homo sapien
HTVPLSEDQLL

SEQ ID NO: 528 - protein, 9 aa, Homo sapien
HVISNDVCA

SEQ ID NO: 529 - protein, 11 aa, Homo sapien
HVISNDVCAQV

SEQ ID NO: 530 - protein, 10 aa, Homo sapien
IAEAVGLPSI

SEQ ID NO: 531 - protein, 8 aa, Homo sapien
IALSVGCT

SEQ ID NO: 532 - protein, 10 aa, Homo sapien
IALSVGCTGA

SEQ ID NO: 533 - protein, 11 aa, Homo sapien
IALSVGCTGAV

SEQ ID NO: 534 - protein, 9 aa, Homo sapien
IASGRARYT

SEQ ID NO: 535 - protein, 9 aa, Homo sapien
IASKFSERL

SEQ ID NO: 536 - protein, 10 aa, Homo sapien
IATLGKLSGL

SEQ ID NO: 537 - protein, 9 aa, Homo sapien
IINEDGNEI

SEQ ID NO: 538 - protein, 8 aa, Homo sapien
ILFASWDA

SEQ ID NO: 539 - protein, 10 aa, Homo sapien
ILGGHRDSWV

SEQ ID NO: 540 - protein, 8 aa, Homo sapien
ILLGRHSL

SEQ ID NO: 541 - protein, 9 aa, Homo sapien
ILLWQPIPV

SEQ ID NO: 542 - protein, 11 aa, Homo sapien
ILLWQPIPVHT

SEQ ID NO: 543 - protein, 8 aa, Homo sapien
ILNHMKRA

SEQ ID NO: 544 - protein, 9 aa, Homo sapien
ILNHMKRAT

SEQ ID NO: 545 - protein, 11 aa, Homo sapien
ILNHMKRATQI

SEQ ID NO: 546 - protein, 11 aa, Homo sapien
ILNLNGAGDPL

SEQ ID NO: 547 - protein, 11 aa, Homo sapien
ILYSDPADYFA

SEQ ID NO: 548 - protein, 8 aa, Homo sapien
IMYSAHDT

SEQ ID NO: 549 - protein, 9 aa, Homo sapien
IMYSAHDTT

SEQ ID NO: 550 - protein, 10 aa, Homo sapien
IMYSAHDTTV

SEQ ID NO: 551 - protein, 10 aa, Homo sapien
IQSQWKEFGL

SEQ ID NO: 552 - protein, 8 aa, Homo sapien
ITDVVKVL

SEQ ID NO: 553 - protein, 10 aa, Homo sapien
ITDVVKVLGL

SEQ ID NO: 554 - protein, 9 aa, Homo sapien
ITPKHNMKA

SEQ ID NO: 555 - protein, 11 aa, Homo sapien
ITPKHNMKAFL

SEQ ID NO: 556 - protein, 10 aa, Homo sapien
ITSWGPEPCA

SEQ ID NO: 557 - protein, 11 aa, Homo sapien
ITSWGPEPCAL

SEQ ID NO: 558 - protein, 10 aa, Homo sapien
ITSWGSEPCA

SEQ ID NO: 559 - protein, 11 aa, Homo sapien
ITSWGSEPCAL

SEQ ID NO: 560 - protein, 9 aa, Homo sapien
IVIARYGKV

SEQ ID NO: 561 - protein, 11 aa, Homo sapien
IVLPFDCRDYA

SEQ ID NO: 562 - protein, 10 aa, Homo sapien
IVLRMMNDQL

SEQ ID NO: 563 - protein, 11 aa, Homo sapien
IVLRMMNDQLM

SEQ ID NO: 564 - protein, 8 aa, Homo sapien
IVRSFGTL

SEQ ID NO: 565 - protein, 9 aa, Homo sapien
KAENIKKFL

SEQ ID NO: 566 - protein, 9 aa, Homo sapien
KAFLDELKA

SEQ ID NO: 567 - protein, 10 aa, Homo sapien
KAWGEVKRQI

SEQ ID NO: 568 - protein, 8 aa, Homo sapien
KINCSGKI

SEQ ID NO: 569 - protein, 9 aa, Homo sapien
KINCSGKIV

SEQ ID NO: 570 - protein, 10 aa, Homo sapien
KINCSGKIVI

SEQ ID NO: 571 - protein, 11 aa, Homo sapien
KINCSGKIVIA

SEQ ID NO: 572 - protein, 8 aa, Homo sapien
KITDVVKV

SEQ ID NO: 573 - protein, 9 aa, Homo sapien
KITDVVKVL

SEQ ID NO: 574 - protein, 11 aa, Homo sapien
KITDVVKVLGL

SEQ ID NO: 575 - protein, 10 aa, Homo sapien
KIVIARYGKV

SEQ ID NO: 576 - protein, 8 aa, Homo sapien
KLERDMKI

SEQ ID NO: 577 - protein, 10 aa, Homo sapien
KLGSGNDFEV

SEQ ID NO: 578 - protein, 10 aa, Homo sapien
KLIMYSAHDT

SEQ ID NO: 579 - protein, 11 aa, Homo sapien
KLIMYSAHDTT

SEQ ID NO: 580 - protein, 10 aa, Homo sapien
KLLEKMGGSA

SEQ ID NO: 581 - protein, 9 aa, Homo sapien
KLQCVDLHV

SEQ ID NO: 582 - protein, 10 aa, Homo sapien
KLQCVDLHVI

SEQ ID NO: 583 - protein, 8 aa, Homo sapien
KLRELSEL

SEQ ID NO: 584 - protein, 10 aa, Homo sapien
KLRELSELSL

SEQ ID NO: 585 - protein, 11 aa, Homo sapien
KLRELSELSLL

SEQ ID NO: 586 - protein, 10 aa, Homo sapien
KLSGLHGQDL

SEQ ID NO: 587 - protein, 10 aa, Homo sapien
KMHIHSTNEV

SEQ ID NO: 588 - protein, 11 aa, Homo sapien
KMHIHSTNEVT

SEQ ID NO: 589 - protein, 8 aa, Homo sapien
KQKEKSRL

SEQ ID NO: 590 - protein, 9 aa, Homo sapien
KTHPNYISI

SEQ ID NO: 591 - protein, 10 aa, Homo sapien
KTHPNYISII

SEQ ID NO: 592 - protein, 10 aa, Homo sapien
KTYSVSFDSL

SEQ ID NO: 593 - protein, 11 aa, Homo sapien
KVDPSKAWGEV

SEQ ID NO: 594 - protein, 8 aa, Homo sapien
KVFRGNKV

SEQ ID NO: 595 - protein, 11 aa, Homo sapien
KVFRGNKVKNA

SEQ ID NO: 596 - protein, 9 aa, Homo sapien
KVKMHIHST

SEQ ID NO: 597 - protein, 8 aa, Homo sapien
KVKNAQLA

SEQ ID NO: 598 - protein, 10 aa, Homo sapien
KVKNAQLAGA

SEQ ID NO: 599 - protein, 11 aa, Homo sapien
KVLGLPTQEPA

SEQ ID NO: 600 - protein, 11 aa, Homo sapien
KVMDLPTQEPA

SEQ ID NO: 601 - protein, 11 aa, Homo sapien
KVPYNVGPGFT

SEQ ID NO: 602 - protein, 9 aa, Homo sapien
KVTEFMLCA

SEQ ID NO: 603 - protein, 11 aa, Homo sapien
KVTEFMLCAGL

SEQ ID NO: 604 - protein, 9 aa, Homo sapien
KVTKFMLCA

SEQ ID NO: 605 - protein, 9 aa, Homo sapien
KVVHYRKWI

SEQ ID NO: 606 - protein, 9 aa, Homo sapien
KVVHYRKWI

SEQ ID NO: 607 - protein, 11 aa, Homo sapien
KVYDPLYCESV

SEQ ID NO: 608 - protein, 10 aa, Homo sapien
LAALFPPEGV

SEQ ID NO: 609 - protein, 8 aa, Homo sapien
LAGAKGVI

SEQ ID NO: 610 - protein, 9 aa, Homo sapien
LAGAKGVIL

SEQ ID NO: 611 - protein, 8 aa, Homo sapien
LAGGFFLL

SEQ ID NO: 612 - protein, 11 aa, Homo sapien
LAGGFFLLGFL

SEQ ID NO: 613 - protein, 10 aa, Homo sapien
LAGTEQNFQL

SEQ ID NO: 614 - protein, 11 aa, Homo sapien
LAGTEQNFQLA

SEQ ID NO: 615 - protein, 8 aa, Homo sapien
LAHYDVLL

SEQ ID NO: 616 - protein, 8 aa, Homo sapien
LAKELKFV

SEQ ID NO: 617 - protein, 9 aa, Homo sapien
LAKELKFVT

SEQ ID NO: 618 - protein, 10 aa, Homo sapien
LAKELKFVTL

SEQ ID NO: 619 - protein, 11 aa, Homo sapien
LAKELKFVTLV

SEQ ID NO: 620 - protein, 9 aa, Homo sapien
LARAASLSL

SEQ ID NO: 621 - protein, 9 aa, Homo sapien
LIMYSAHDT

SEQ ID NO: 622 - protein, 10 aa, Homo sapien
LIMYSAHDTT

SEQ ID NO: 623 - protein, 11 aa, Homo sapien
LIMYSAHDTTV

SEQ ID NO: 624 - protein, 8 aa, Homo sapien
LLARAASL

SEQ ID NO: 625 - protein, 10 aa, Homo sapien
LLARAASLSL

SEQ ID NO: 626 - protein, 9 aa, Homo sapien
LLEKMGGSA

SEQ ID NO: 627 - protein, 10 aa, Homo sapien
LLFFWLDRSV

SEQ ID NO: 628 - protein, 11 aa, Homo sapien
LLFFWLDRSVL

SEQ ID NO: 629 - protein, 10 aa, Homo sapien
LLGFLFGWFI

SEQ ID NO: 630 - protein, 8 aa, Homo sapien
LLGSTEWA

SEQ ID NO: 631 - protein, 8 aa, Homo sapien
LLHETDSA

SEQ ID NO: 632 - protein, 9 aa, Homo sapien
LLHETDSAV

SEQ ID NO: 633 - protein, 10 aa, Homo sapien
LLHETDSAVA

SEQ ID NO: 634 - protein, 11 aa, Homo sapien
LLHETDSAVAT

SEQ ID NO: 635 - protein, 9 aa, Homo sapien
LLLARAASL

SEQ ID NO: 636 - protein, 11 aa, Homo sapien
LLLARAASLSL

SEQ ID NO: 637 - protein, 10 aa, Homo sapien
LLPPYASCHL

SEQ ID NO: 638 - protein, 11 aa, Homo sapien
LLPPYASCHLT

SEQ ID NO: 639 - protein, 8 aa, Homo sapien
LLQERGVA

SEQ ID NO: 640 - protein, 10 aa, Homo sapien
LLQERGVAYI

SEQ ID NO: 641 - protein, 8 aa, Homo sapien
LLRLSEPA

SEQ ID NO: 642 - protein, 8 aa, Homo sapien
LLRLSEPA

SEQ ID NO: 643 - protein, 10 aa, Homo sapien
LLRLSEPAEL

SEQ ID NO: 644 - protein, 11 aa, Homo sapien
LLRLSEPAELT

SEQ ID NO: 645 - protein, 10 aa, Homo sapien
LLRLSEPAKI

SEQ ID NO: 646 - protein, 11 aa, Homo sapien
LLRLSEPAKIT

SEQ ID NO: 647 - protein, 8 aa, Homo sapien
LLSNDMCA

SEQ ID NO: 648 - protein, 10 aa, Homo sapien
LLSNDMCARA

SEQ ID NO: 649 - protein, 8 aa, Homo sapien
LLSYPNKT

SEQ ID NO: 650 - protein, 8 aa, Homo sapien
LLWQPIPV

SEQ ID NO: 651 - protein, 10 aa, Homo sapien
LLWQPIPVHT

SEQ ID NO: 652 - protein, 11 aa, Homo sapien
LLWQPIPVHTV

SEQ ID NO: 653 - protein, 9 aa, Homo sapien
LMFLERAFI

SEQ ID NO: 654 - protein, 10 aa, Homo sapien
LMLLRLSEPA

SEQ ID NO: 655 - protein, 10 aa, Homo sapien
LMLLRLSEPA

SEQ ID NO: 656 - protein, 8 aa, Homo sapien
LMSAMTNL

SEQ ID NO: 657 - protein, 9 aa, Homo sapien
LMSAMTNLA

SEQ ID NO: 658 - protein, 10 aa, Homo sapien
LMSAMTNLAA

SEQ ID NO: 659 - protein, 11 aa, Homo sapien
LMSAMTNLAAL

SEQ ID NO: 660 - protein, 9 aa, Homo sapien
LMYSLVHNL

SEQ ID NO: 661 - protein, 10 aa, Homo sapien
LMYSLVHNLT

SEQ ID NO: 662 - protein, 8 aa, Homo sapien
LQCVDLHV

SEQ ID NO: 663 - protein, 9 aa, Homo sapien
LQCVDLHVI

SEQ ID NO: 664 - protein, 8 aa, Homo sapien
LQCVSLHL

SEQ ID NO: 665 - protein, 9 aa, Homo sapien
LQCVSLHLL

SEQ ID NO: 666 - protein, 10 aa, Homo sapien
LQDFDKSNPI

SEQ ID NO: 667 - protein, 11 aa, Homo sapien
LQDFDKSNPIV

SEQ ID NO: 668 - protein, 9 aa, Homo sapien
LQERGVAYI

SEQ ID NO: 669 - protein, 11 aa, Homo sapien
LQERGVAYINA

SEQ ID NO: 670 - protein, 10 aa, Homo sapien
LQGGVLVNEI

SEQ ID NO: 671 - protein, 11 aa, Homo sapien
LQGGVLVNEIL

SEQ ID NO: 672 - protein, 11 aa, Homo sapien
LQMALDVYNGL

SEQ ID NO: 673 - protein, 8 aa, Homo sapien
LTDAVKVM

SEQ ID NO: 674 - protein, 10 aa, Homo sapien
LTDAVKVMDL

SEQ ID NO: 675 - protein, 8 aa, Homo sapien
LTLSVTWI

SEQ ID NO: 676 - protein, 10 aa, Homo sapien
LTLSVTWIGA

SEQ ID NO: 677 - protein, 11 aa, Homo sapien
LTLSVTWIGAA

SEQ ID NO: 678 - protein, 11 aa, Homo sapien
LTPGYPANEYA

SEQ ID NO: 679 - protein, 9 aa, Homo sapien
LTPKKLQCV

SEQ ID NO: 680 - protein, 11 aa, Homo sapien
LTPKKLQCVDL

SEQ ID NO: 681 - protein, 10 aa, Homo sapien
LTVAQVRGGM

SEQ ID NO: 682 - protein, 11 aa, Homo sapien
LTVAQVRGGMV

SEQ ID NO: 683 - protein, 8 aa, Homo sapien
LVASRGRA

SEQ ID NO: 684 - protein, 9 aa, Homo sapien
LVASRGRAV

SEQ ID NO: 685 - protein, 10 aa, Homo sapien
LVCNGVLQGI

SEQ ID NO: 686 - protein, 10 aa, Homo sapien
LVCNGVLQGI

SEQ ID NO: 687 - protein, 11 aa, Homo sapien
LVCNGVLQGIT

SEQ ID NO: 688 - protein, 11 aa, Homo sapien
LVCNGVLQGIT

SEQ ID NO: 689 - protein, 9 aa, Homo sapien
LVEKFYDPM

SEQ ID NO: 690 - protein, 11 aa, Homo sapien
LVFRHGDRSPI

SEQ ID NO: 691 - protein, 9 aa, Homo sapien
LVHNLTKEL

SEQ ID NO: 692 - protein, 8 aa, Homo sapien
LVHPQWVL

SEQ ID NO: 693 - protein, 8 aa, Homo sapien
LVHPQWVL

SEQ ID NO: 694 - protein, 9 aa, Homo sapien
LVHPQWVLT

SEQ ID NO: 695 - protein, 9 aa, Homo sapien
LVHPQWVLT

SEQ ID NO: 696 - protein, 10 aa, Homo sapien
LVHPQWVLTA

SEQ ID NO: 697 - protein, 10 aa, Homo sapien
LVHPQWVLTA

SEQ ID NO: 698 - protein, 11 aa, Homo sapien
LVHPQWVLTAA

SEQ ID NO: 699 - protein, 11 aa, Homo sapien
LVHPQWVLTAA

SEQ ID NO: 700 - protein, 9 aa, Homo sapien
LVLAGGFFL

SEQ ID NO: 701 - protein, 10 aa, Homo sapien
LVLAGGFFLL

SEQ ID NO: 702 - protein, 9 aa, Homo sapien
LVLSIALSV

SEQ ID NO: 703 - protein, 9 aa, Homo sapien
LVNEILNHM

SEQ ID NO: 704 - protein, 9 aa, Homo sapien
LVYVNYART

SEQ ID NO: 705 - protein, 9 aa, Homo sapien
MALDVYNGL

SEQ ID NO: 706 - protein, 10 aa, Homo sapien
MALDVYNGLL

SEQ ID NO: 707 - protein, 8 aa, Homo sapien
MLCAGLWT

SEQ ID NO: 708 - protein, 8 aa, Homo sapien
MLCAGRWT

SEQ ID NO: 709 - protein, 9 aa, Homo sapien
MLLRLSEPA

SEQ ID NO: 710 - protein, 9 aa, Homo sapien
MLLRLSEPA

SEQ ID NO: 711 - protein, 11 aa, Homo sapien
MLLRLSEPAEL

SEQ ID NO: 712 - protein, 11 aa, Homo sapien
MLLRLSEPAKI

SEQ ID NO: 713 - protein, 11 aa, Homo sapien
MLPGCSPSCPL

SEQ ID NO: 714 - protein, 9 aa, Homo sapien
MMNDQLMFL

SEQ ID NO: 715 - protein, 10 aa, Homo sapien
MTKLRELSEL

SEQ ID NO: 716 - protein, 9 aa, Homo sapien
MTTNSHQGT

SEQ ID NO: 717 - protein, 9 aa, Homo sapien
MVFELANSI

SEQ ID NO: 718 - protein, 10 aa, Homo sapien
MVFELANSIV

SEQ ID NO: 719 - protein, 11 aa, Homo sapien
MVFELANSIVL

SEQ ID NO: 720 - protein, 11 aa, Homo sapien
NADSSIEGNYT

SEQ ID NO: 721 - protein, 10 aa, Homo sapien
NAQLAGAKGV

SEQ ID NO: 722 - protein, 11 aa, Homo sapien
NAQLAGAKGVI

SEQ ID NO: 723 - protein, 10 aa, Homo sapien
NIKKFLYNFT

SEQ ID NO: 724 - protein, 8 aa, Homo sapien
NILNLNGA

SEQ ID NO: 725 - protein, 8 aa, Homo sapien
NITPKHNM

SEQ ID NO: 726 - protein, 10 aa, Homo sapien
NITPKHNMKA

SEQ ID NO: 727 - protein, 11 aa, Homo sapien
NLAALFPPEGV

SEQ ID NO: 728 - protein, 8 aa, Homo sapien
NLFEPEDT

SEQ ID NO: 729 - protein, 9 aa, Homo sapien
NLLHETDSA

SEQ ID NO: 730 - protein, 10 aa, Homo sapien
NLLHETDSAV

SEQ ID NO: 731 - protein, 11 aa, Homo sapien
NLLHETDSAVA

SEQ ID NO: 732 - protein, 9 aa, Homo sapien
NLNGAGDPL

SEQ ID NO: 733 - protein, 10 aa, Homo sapien
NLNGAGDPLT

SEQ ID NO: 734 - protein, 9 aa, Homo sapien
NMKAFLDEL

SEQ ID NO: 735 - protein, 11 aa, Homo sapien
NMKAFLDELKA

SEQ ID NO: 736 - protein, 10 aa, Homo sapien
NMSLLKHQSL

SEQ ID NO: 737 - protein, 9 aa, Homo sapien
NVIGTLRGA

SEQ ID NO: 738 - protein, 10 aa, Homo sapien
NVIGTLRGAV

SEQ ID NO: 739 - protein, 11 aa, Homo sapien
NVSDIVPPFSA

SEQ ID NO: 740 - protein, 9 aa, Homo sapien
PADYFAPGV

SEQ ID NO: 741 - protein, 8 aa, Homo sapien
PAELTDAV

SEQ ID NO: 742 - protein, 10 aa, Homo sapien
PAELTDAVKV

SEQ ID NO: 743 - protein, 11 aa, Homo sapien
PAELTDAVKVM

SEQ ID NO: 744 - protein, 8 aa, Homo sapien
PAKITDVV

SEQ ID NO: 745 - protein, 10 aa, Homo sapien
PAKITDVVKV

SEQ ID NO: 746 - protein, 11 aa, Homo sapien
PAKITDVVKVL

SEQ ID NO: 747 - protein, 9 aa, Homo sapien
PALGTTCYA

SEQ ID NO: 748 - protein, 9 aa, Homo sapien
PALGTTCYA

SEQ ID NO: 749 - protein, 11 aa, Homo sapien
PANEYAYRRGI

SEQ ID NO: 750 - protein, 8 aa, Homo sapien
PAVYTKVV

SEQ ID NO: 751 - protein, 10 aa, Homo sapien
PIDTFPTDPI

SEQ ID NO: 752 - protein, 10 aa, Homo sapien
PIGYYDAQKL

SEQ ID NO: 753 - protein, 11 aa, Homo sapien
PIGYYDAQKLL

SEQ ID NO: 754 - protein, 8 aa, Homo sapien
PILLWQPI

SEQ ID NO: 755 - protein, 10 aa, Homo sapien
PILLWQPIPV

SEQ ID NO: 756 - protein, 9 aa, Homo sapien
PIPVHTVPL

SEQ ID NO: 757 - protein, 11 aa, Homo sapien
PIVLRMMNDQL

SEQ ID NO: 758 - protein, 8 aa, Homo sapien
PLERFAEL

SEQ ID NO: 759 - protein, 9 aa, Homo sapien
PLERFAELV

SEQ ID NO: 760 - protein, 8 aa, Homo sapien
PLILSRIV

SEQ ID NO: 761 - protein, 8 aa, Homo sapien
PLIQSRIV

SEQ ID NO: 762 - protein, 8 aa, Homo sapien
PLLLARAA

SEQ ID NO: 763 - protein, 10 aa, Homo sapien
PLLLARAASL

SEQ ID NO: 764 - protein, 10 aa, Homo sapien
PLMYSLVHNL

SEQ ID NO: 765 - protein, 11 aa, Homo sapien
PLMYSLVHNLT

SEQ ID NO: 766 - protein, 8 aa, Homo sapien
PLSEDQLL

SEQ ID NO: 767 - protein, 10 aa, Homo sapien
PLSEDQLLYL

SEQ ID NO: 768 - protein, 8 aa, Homo sapien
PLTPGYPA

SEQ ID NO: 769 - protein, 8 aa, Homo sapien
PLVCNGVL

SEQ ID NO: 770 - protein, 8 aa, Homo sapien
PLVCNGVL

SEQ ID NO: 771 - protein, 11 aa, Homo sapien
PLVCNGVLQGI

SEQ ID NO: 772 - protein, 11 aa, Homo sapien
PLVCNGVLQGI

SEQ ID NO: 773 - protein, 11 aa, Homo sapien
PLYCESVHNFT

SEQ ID NO: 774 - protein, 8 aa, Homo sapien
PLYDMSLL

SEQ ID NO: 775 - protein, 9 aa, Homo sapien
PLYHSVYET

SEQ ID NO: 776 - protein, 8 aa, Homo sapien
PLYNMSLL

SEQ ID NO: 777 - protein, 8 aa, Homo sapien
PMFKYHLT

SEQ ID NO: 778 - protein, 9 aa, Homo sapien
PMFKYHLTV

SEQ ID NO: 779 - protein, 10 aa, Homo sapien
PMFKYHLTVA

SEQ ID NO: 780 - protein, 9 aa, Homo sapien
PQDWSTECM

SEQ ID NO: 781 - protein, 10 aa, Homo sapien
PQDWSTECMT

SEQ ID NO: 782 - protein, 11 aa, Homo sapien
PQDWSTECMTT

SEQ ID NO: 783 - protein, 9 aa, Homo sapien
PQEMKTYSV

SEQ ID NO: 784 - protein, 8 aa, Homo sapien
PQGFGQLT

SEQ ID NO: 785 - protein, 10 aa, Homo sapien
PQGFGQLTQL

SEQ ID NO: 786 - protein, 9 aa, Homo sapien
PQGMPEGDL

SEQ ID NO: 787 - protein, 10 aa, Homo sapien
PQGMPEGDLV

SEQ ID NO: 788 - protein, 8 aa, Homo sapien
PQKVTKFM

SEQ ID NO: 789 - protein, 9 aa, Homo sapien
PQKVTKFML

SEQ ID NO: 790 - protein, 11 aa, Homo sapien
PQKVTKFMLCA

SEQ ID NO: 791 - protein, 8 aa, Homo sapien
PQSGAAVV

SEQ ID NO: 792 - protein, 11 aa, Homo sapien
PQSGAAVVHEI

SEQ ID NO: 793 - protein, 8 aa, Homo sapien
PQWVLTAA

SEQ ID NO: 794 - protein, 8 aa, Homo sapien
PQWVLTAA

SEQ ID NO: 795 - protein, 11 aa, Homo sapien
PQWVLTAAHCI

SEQ ID NO: 796 - protein, 11 aa, Homo sapien
PQWVLTAAHCL

SEQ ID NO: 797 - protein, 9 aa, Homo sapien
PTQEPALGT

SEQ ID NO: 798 - protein, 9 aa, Homo sapien
PTQEPALGT

SEQ ID NO: 799 - protein, 10 aa, Homo sapien
PTQEPALGTT

SEQ ID NO: 800 - protein, 10 aa, Homo sapien
PTQEPALGTT

SEQ ID NO: 801 - protein, 10 aa, Homo sapien
PVHPIGYYDA

SEQ ID NO: 802 - protein, 9 aa, Homo sapien
PVIPQDWST

SEQ ID NO: 803 - protein, 10 aa, Homo sapien
PVSHSFPHPL

SEQ ID NO: 804 - protein, 10 aa, Homo sapien
QAAAETLSEV

SEQ ID NO: 805 - protein, 11 aa, Homo sapien
QAAAETLSEVA

SEQ ID NO: 806 - protein, 8 aa, Homo sapien
QIPHLAGT

SEQ ID NO: 807 - protein, 8 aa, Homo sapien
QIPSYKKL

SEQ ID NO: 808 - protein, 9 aa, Homo sapien
QIPSYKKLI

SEQ ID NO: 809 - protein, 10 aa, Homo sapien
QIPSYKKLIM

SEQ ID NO: 810 - protein, 11 aa, Homo sapien
QIQSQWKEFGL

SEQ ID NO: 811 - protein, 8 aa, Homo sapien
QIYVAAFT

SEQ ID NO: 812 - protein, 9 aa, Homo sapien
QIYVAAFTV

SEQ ID NO: 813 - protein, 11 aa, Homo sapien
QIYVAAFTVQA

SEQ ID NO: 814 - protein, 8 aa, Homo sapien
QLAGAKGV

SEQ ID NO: 815 - protein, 9 aa, Homo sapien
QLAGAKGVI

SEQ ID NO: 816 - protein, 10 aa, Homo sapien
QLAGAKGVIL

SEQ ID NO: 817 - protein, 10 aa, Homo sapien
QLGMEQHYEL

SEQ ID NO: 818 - protein, 8 aa, Homo sapien
QLMFLERA

SEQ ID NO: 819 - protein, 10 aa, Homo sapien
QLMFLERAFI

SEQ ID NO: 820 - protein, 10 aa, Homo sapien
QMALDVYNGL

SEQ ID NO: 821 - protein, 11 aa, Homo sapien
QMALDVYNGLL

SEQ ID NO: 822 - protein, 10 aa, Homo sapien
QVAVYSHGWA

SEQ ID NO: 823 - protein, 8 aa, Homo sapien
QVHPQKVT

SEQ ID NO: 824 - protein, 11 aa, Homo sapien
QVHPQKVTKFM

SEQ ID NO: 825 - protein, 10 aa, Homo sapien
QVLVASRGRA

SEQ ID NO: 826 - protein, 11 aa, Homo sapien
QVLVASRGRAV

SEQ ID NO: 827 - protein, 10 aa, Homo sapien
QVRGGMVFEL

SEQ ID NO: 828 - protein, 11 aa, Homo sapien
QVRGGMVFELA

SEQ ID NO: 829 - protein, 10 aa, Homo sapien
QVSHSFPHPL

SEQ ID NO: 830 - protein, 9 aa, Homo sapien
QVWLGRHNL

SEQ ID NO: 831 - protein, 9 aa, Homo sapien
QVYIRSTDV

SEQ ID NO: 832 - protein, 8 aa, Homo sapien
RAAPLLLA

SEQ ID NO: 833 - protein, 10 aa, Homo sapien
RAAPLLLARA

SEQ ID NO: 834 - protein, 11 aa, Homo sapien
RAAPLLLARAA

SEQ ID NO: 835 - protein, 10 aa, Homo sapien
RAASLSLGFL

SEQ ID NO: 836 - protein, 9 aa, Homo sapien
RAFIDPLGL

SEQ ID NO: 837 - protein, 10 aa, Homo sapien
RARYTKNWET

SEQ ID NO: 838 - protein, 11 aa, Homo sapien
RATQIPSYKKL

SEQ ID NO: 839 - protein, 8 aa, Homo sapien
RAVCGGVL

SEQ ID NO: 840 - protein, 9 aa, Homo sapien
RAVCGGVLV

SEQ ID NO: 841 - protein, 8 aa, Homo sapien
RAYSEKVT

SEQ ID NO: 842 - protein, 11 aa, Homo sapien
RAYSEKVTEFM

SEQ ID NO: 843 - protein, 8 aa, Homo sapien
RIYNVIGT

SEQ ID NO: 844 - protein, 9 aa, Homo sapien
RIYNVIGTL

SEQ ID NO: 845 - protein, 9 aa, Homo sapien
RLGIASGRA

SEQ ID NO: 846 - protein, 9 aa, Homo sapien
RLHPYKDFI

SEQ ID NO: 847 - protein, 10 aa, Homo sapien
RLHPYKDFIA

SEQ ID NO: 848 - protein, 11 aa, Homo sapien
RLHPYKDFIAT

SEQ ID NO: 849 - protein, 8 aa, Homo sapien
RLLQERGV

SEQ ID NO: 850 - protein, 9 aa, Homo sapien
RLLQERGVA

SEQ ID NO: 851 - protein, 11 aa, Homo sapien
RLLQERGVAYI

SEQ ID NO: 852 - protein, 11 aa, Homo sapien
RLQDFDKSNPI

SEQ ID NO: 853 - protein, 8 aa, Homo sapien
RLQGGVLV

SEQ ID NO: 854 - protein, 11 aa, Homo sapien
RLQGGVLVNEI

SEQ ID NO: 855 - protein, 8 aa, Homo sapien
RLSEPAEL

SEQ ID NO: 856 - protein, 9 aa, Homo sapien
RLSEPAELT

SEQ ID NO: 857 - protein, 11 aa, Homo sapien
RLSEPAELTDA

SEQ ID NO: 858 - protein, 8 aa, Homo sapien
RLSEPAKI

SEQ ID NO: 859 - protein, 9 aa, Homo sapien
RLSEPAKIT

SEQ ID NO: 860 - protein, 11 aa, Homo sapien
RLSEPAKITDV

SEQ ID NO: 861 - protein, 8 aa, Homo sapien
RMMNDQLM

SEQ ID NO: 862 - protein, 10 aa, Homo sapien
RMMNDQLMFL

SEQ ID NO: 863 - protein, 9 aa, Homo sapien
RQIYVAAFT

SEQ ID NO: 864 - protein, 10 aa, Homo sapien
RQIYVAAFTV

SEQ ID NO: 865 - protein, 8 aa, Homo sapien
RTEDFFKL

SEQ ID NO: 866 - protein, 10 aa, Homo sapien
RTILFASWDA

SEQ ID NO: 867 - protein, 8 aa, Homo sapien
RTLMSAMT

SEQ ID NO: 868 - protein, 10 aa, Homo sapien
RTLMSAMTNL

SEQ ID NO: 869 - protein, 11 aa, Homo sapien
RTLMSAMTNLA

SEQ ID NO: 870 - protein, 8 aa, Homo sapien
RVDCTPLM

SEQ ID NO: 871 - protein, 11 aa, Homo sapien
RVDCTPLMYSL

SEQ ID NO: 872 - protein, 8 aa, Homo sapien
SAFSPQGM

SEQ ID NO: 873 - protein, 10 aa, Homo sapien
SAHDTTVSGL

SEQ ID NO: 874 - protein, 8 aa, Homo sapien
SAMTNLAA

SEQ ID NO: 875 - protein, 9 aa, Homo sapien
SAMTNLAAL

SEQ ID NO: 876 - protein, 9 aa, Homo sapien
SAVKNFTEI

SEQ ID NO: 877 - protein, 10 aa, Homo sapien
SAVKNFTEIA

SEQ ID NO: 878 - protein, 9 aa, Homo sapien
SIALSVGCT

SEQ ID NO: 879 - protein, 11 aa, Homo sapien
SIALSVGCTGA

SEQ ID NO: 880 - protein, 8 aa, Homo sapien
SIEGNYTL

SEQ ID NO: 881 - protein, 10 aa, Homo sapien
SIEGNYTLRV

SEQ ID NO: 882 - protein, 8 aa, Homo sapien
SIEPEEFL

SEQ ID NO: 883 - protein, 8 aa, Homo sapien
SIEPEEFL

SEQ ID NO: 884 - protein, 9 aa, Homo sapien
SIEPEEFLT

SEQ ID NO: 885 - protein, 10 aa, Homo sapien
SIINEDGNEI

SEQ ID NO: 886 - protein, 10 aa, Homo sapien
SISMKHPQEM

SEQ ID NO: 887 - protein, 8 aa, Homo sapien
SIWNPILL

SEQ ID NO: 888 - protein, 8 aa, Homo sapien
SLFHPEDT

SEQ ID NO: 889 - protein, 11 aa, Homo sapien
SLFHPEDTGQV

SEQ ID NO: 890 - protein, 10 aa, Homo sapien
SLFSAVKNFT

SEQ ID NO: 891 - protein, 8 aa, Homo sapien
SLGFLFLL

SEQ ID NO: 892 - protein, 9 aa, Homo sapien
SLHLLSNDM

SEQ ID NO: 893 - protein, 11 aa, Homo sapien
SLHLLSNDMCA

SEQ ID NO: 894 - protein, 8 aa, Homo sapien
SLKVPYNV

SEQ ID NO: 895 - protein, 8 aa, Homo sapien
SLLKHQSL

SEQ ID NO: 896 - protein, 8 aa, Homo sapien
SLLKNRFL

SEQ ID NO: 897 - protein, 8 aa, Homo sapien
SLLSLYGI

SEQ ID NO: 898 - protein, 9 aa, Homo sapien
SLQCVSLHL

SEQ ID NO: 899 - protein, 10 aa, Homo sapien
SLQCVSLHLL

SEQ ID NO: 900 - protein, 9 aa, Homo sapien
SLSLGFLFL

SEQ ID NO: 901 - protein, 10 aa, Homo sapien
SLSLGFLFLL

SEQ ID NO: 902 - protein, 10 aa, Homo sapien
SLVHNLTKEL

SEQ ID NO: 903 - protein, 8 aa, Homo sapien
SMKHPQEM

SEQ ID NO: 904 - protein, 10 aa, Homo sapien
SMKHPQEMKT

SEQ ID NO: 905 - protein, 8 aa, Homo sapien
SQPWQVAV

SEQ ID NO: 906 - protein, 8 aa, Homo sapien
SQPWQVLV

SEQ ID NO: 907 - protein, 9 aa, Homo sapien
SQPWQVLVA

SEQ ID NO: 908 - protein, 10 aa, Homo sapien
SQVWLGRHNL

SEQ ID NO: 909 - protein, 8 aa, Homo sapien
SQWKEFGL

SEQ ID NO: 910 - protein, 11 aa, Homo sapien
SQWKEFGLDSV

SEQ ID NO: 911 - protein, 11 aa, Homo sapien
STCSGDSGGPL

SEQ ID NO: 912 - protein, 8 aa, Homo sapien
STDVDRTL

SEQ ID NO: 913 - protein, 9 aa, Homo sapien
STDVDRTLM

SEQ ID NO: 914 - protein, 11 aa, Homo sapien
STDVDRTLMSA

SEQ ID NO: 915 - protein, 11 aa, Homo sapien
STEWAEENSRL

SEQ ID NO: 916 - protein, 8 aa, Homo sapien
STNEVTRI

SEQ ID NO: 917 - protein, 11 aa, Homo sapien
STNEVTRIYNV

SEQ ID NO: 918 - protein, 9 aa, Homo sapien
STQKVKMHI

SEQ ID NO: 919 - protein, 9 aa, Homo sapien
SVELAHYDV

SEQ ID NO: 920 - protein, 10 aa, Homo sapien
SVELAHYDVL

SEQ ID NO: 921 - protein, 11 aa, Homo sapien
SVELAHYDVLL

SEQ ID NO: 922 - protein, 8 aa, Homo sapien
SVGCTGAV

SEQ ID NO: 923 - protein, 10 aa, Homo sapien
SVGCTGAVPL

SEQ ID NO: 924 - protein, 11 aa, Homo sapien
SVGCTGAVPLI

SEQ ID NO: 925 - protein, 11 aa, Homo sapien
SVHNFTLPSWA

SEQ ID NO: 926 - protein, 10 aa, Homo sapien
SVILLGRHSL

SEQ ID NO: 927 - protein, 10 aa, Homo sapien
SVLAKELKFV

SEQ ID NO: 928 - protein, 11 aa, Homo sapien
SVLAKELKFVT

SEQ ID NO: 929 - protein, 10 aa, Homo sapien
SVSFDSLFSA

SEQ ID NO: 930 - protein, 11 aa, Homo sapien
SVSFDSLFSAV

SEQ ID NO: 931 - protein, 8 aa, Homo sapien
SVTWIGAA

SEQ ID NO: 932 - protein, 10 aa, Homo sapien
SVTWIGAAPL

SEQ ID NO: 933 - protein, 11 aa, Homo sapien
SVTWIGAAPLI

SEQ ID NO: 934 - protein, 8 aa, Homo sapien
SVYETYEL

SEQ ID NO: 935 - protein, 9 aa, Homo sapien
SVYETYELV

SEQ ID NO: 936 - protein, 11 aa, Homo sapien
TAAHCIRNKSV

SEQ ID NO: 937 - protein, 8 aa, Homo sapien
TARRPRWL

SEQ ID NO: 938 - protein, 10 aa, Homo sapien
TARRPRWLCA

SEQ ID NO: 939 - protein, 9 aa, Homo sapien
TILFASWDA

SEQ ID NO: 940 - protein, 8 aa, Homo sapien
TLGKLSGL

SEQ ID NO: 941 - protein, 11 aa, Homo sapien
TLKSEEFQKRL

SEQ ID NO: 942 - protein, 9 aa, Homo sapien
TLMSAMTNL

SEQ ID NO: 943 - protein, 10 aa, Homo sapien
TLMSAMTNLA

SEQ ID NO: 944 - protein, 11 aa, Homo sapien
TLMSAMTNLAA

SEQ ID NO: 945 - protein, 10 aa, Homo sapien
TLPSWATEDT

SEQ ID NO: 946 - protein, 11 aa, Homo sapien
TLPSWATEDTM

SEQ ID NO: 947 - protein, 9 aa, Homo sapien
TLRVDCTPL

SEQ ID NO: 948 - protein, 10 aa, Homo sapien
TLRVDCTPLM

SEQ ID NO: 949 - protein, 9 aa, Homo sapien
TLSVTWIGA

SEQ ID NO: 950 - protein, 10 aa, Homo sapien
TLSVTWIGAA

SEQ ID NO: 951 - protein, 8 aa, Homo sapien
TMTKLREL

SEQ ID NO: 952 - protein, 11 aa, Homo sapien
TMTKLRELSEL

SEQ ID NO: 953 - protein, 8 aa, Homo sapien
TQEPALGT

SEQ ID NO: 954 - protein, 8 aa, Homo sapien
TQEPALGT

SEQ ID NO: 955 - protein, 9 aa, Homo sapien
TQEPALGTT

SEQ ID NO: 956 - protein, 9 aa, Homo sapien
TQEPALGTT

SEQ ID NO: 957 - protein, 8 aa, Homo sapien
TQHEPYPL

SEQ ID NO: 958 - protein, 9 aa, Homo sapien
TQHEPYPLM

SEQ ID NO: 959 - protein, 10 aa, Homo sapien
TQHEPYPLML

SEQ ID NO: 960 - protein, 9 aa, Homo sapien
TQIPHLAGT

SEQ ID NO: 961 - protein, 9 aa, Homo sapien
TQIPSYKKL

SEQ ID NO: 962 - protein, 10 aa, Homo sapien
TQIPSYKKLI

SEQ ID NO: 963 - protein, 11 aa, Homo sapien
TQIPSYKKLIM

SEQ ID NO: 964 - protein, 8 aa, Homo sapien
TQKVKMHI

SEQ ID NO: 965 - protein, 11 aa, Homo sapien
TQKVKMHIHST

SEQ ID NO: 966 - protein, 11 aa, Homo sapien
TQLGMEQHYEL

SEQ ID NO: 967 - protein, 11 aa, Homo sapien
TTCYASGWGSI

SEQ ID NO: 968 - protein, 11 aa, Homo sapien
TTCYASGWGSI

SEQ ID NO: 969 - protein, 8 aa, Homo sapien
TTNSHQGT

SEQ ID NO: 970 - protein, 8 aa, Homo sapien
TTVSGLQM

SEQ ID NO: 971 - protein, 9 aa, Homo sapien
TTVSGLQMA

SEQ ID NO: 972 - protein, 10 aa, Homo sapien
TTVSGLQMAL

SEQ ID NO: 973 - protein, 9 aa, Homo sapien
TVAQVRGGM

SEQ ID NO: 974 - protein, 10 aa, Homo sapien
TVAQVRGGMV

SEQ ID NO: 975 - protein, 9 aa, Homo sapien
TVPLSEDQL

SEQ ID NO: 976 - protein, 10 aa, Homo sapien
TVPLSEDQLL

SEQ ID NO: 977 - protein, 8 aa, Homo sapien
TVQAAAET

SEQ ID NO: 978 - protein, 9 aa, Homo sapien
TVQAAAETL

SEQ ID NO: 979 - protein, 8 aa, Homo sapien
TVSGLQMA

SEQ ID NO: 980 - protein, 9 aa, Homo sapien
TVSGLQMAL

SEQ ID NO: 981 - protein, 11 aa, Homo sapien
TVSGLQMALDV

SEQ ID NO: 982 - protein, 8 aa, Homo sapien
VAAFTVQA

SEQ ID NO: 983 - protein, 9 aa, Homo sapien
VAAFTVQAA

SEQ ID NO: 984 - protein, 10 aa, Homo sapien
VAAFTVQAAA

SEQ ID NO: 985 - protein, 8 aa, Homo sapien
VAQVRGGM

SEQ ID NO: 986 - protein, 9 aa, Homo sapien
VAQVRGGMV

SEQ ID NO: 987 - protein, 8 aa, Homo sapien
VASRGRAV

SEQ ID NO: 988 - protein, 10 aa, Homo sapien
VATARRPRWL

SEQ ID NO: 989 - protein, 9 aa, Homo sapien
VAVYSHGWA

SEQ ID NO: 990 - protein, 10 aa, Homo sapien
VAYINADSSI

SEQ ID NO: 991 - protein, 8 aa, Homo sapien
VIARYGKV

SEQ ID NO: 992 - protein, 8 aa, Homo sapien
VIGTLRGA

SEQ ID NO: 993 - protein, 9 aa, Homo sapien
VIGTLRGAV

SEQ ID NO: 994 - protein, 11 aa, Homo sapien
VILGGHRDSWV

SEQ ID NO: 995 - protein, 9 aa, Homo sapien
VILLGRHSL

SEQ ID NO: 996 - protein, 8 aa, Homo sapien
VILYSDPA

SEQ ID NO: 997 - protein, 8 aa, Homo sapien
VIPQDWST

SEQ ID NO: 998 - protein, 11 aa, Homo sapien
VIPQDWSTECM

SEQ ID NO: 999 - protein, 8 aa, Homo sapien
VISNDVCA

SEQ ID NO: 1000 - protein, 10 aa, Homo sapien
VISNDVCAQV

SEQ ID NO: 1001 - protein, 8 aa, Homo sapien
VLAGGFFL

SEQ ID NO: 1002 - protein, 9 aa, Homo sapien
VLAGGFFLL

SEQ ID NO: 1003 - protein, 9 aa, Homo sapien
VLAKELKFV

SEQ ID NO: 1004 - protein, 10 aa, Homo sapien
VLAKELKFVT

SEQ ID NO: 1005 - protein, 11 aa, Homo sapien
VLAKELKFVTL

SEQ ID NO: 1006 - protein, 10 aa, Homo sapien
VLGLPTQEPA

SEQ ID NO: 1007 - protein, 11 aa, Homo sapien
VLGLPTQEPAL

SEQ ID NO: 1008 - protein, 9 aa, Homo sapien
VLLSYPNKT

SEQ ID NO: 1009 - protein, 10 aa, Homo sapien
VLPFDCRDYA

SEQ ID NO: 1010 - protein, 11 aa, Homo sapien
VLPFDCRDYAV

SEQ ID NO: 1011 - protein, 9 aa, Homo sapien
VLRKYADKI

SEQ ID NO: 1012 - protein, 9 aa, Homo sapien
VLRMMNDQL

SEQ ID NO: 1013 - protein, 10 aa, Homo sapien
VLRMMNDQLM

SEQ ID NO: 1014 - protein, 8 aa, Homo sapien
VLSIALSV

SEQ ID NO: 1015 - protein, 11 aa, Homo sapien
VLSIALSVGCT

SEQ ID NO: 1016 - protein, 8 aa, Homo sapien
VLTAAHCI

SEQ ID NO: 1017 - protein, 8 aa, Homo sapien
VLTAAHCL

SEQ ID NO: 1018 - protein, 9 aa, Homo sapien
VLVASRGRA

SEQ ID NO: 1019 - protein, 10 aa, Homo sapien
VLVASRGRAV

SEQ ID NO: 1020 - protein, 8 aa, Homo sapien
VLVHPQWV

SEQ ID NO: 1021 - protein, 8 aa, Homo sapien
VLVHPQWV

SEQ ID NO: 1022 - protein, 9 aa, Homo sapien
VLVHPQWVL

SEQ ID NO: 1023 - protein, 9 aa, Homo sapien
VLVHPQWVL

SEQ ID NO: 1024 - protein, 10 aa, Homo sapien
VLVHPQWVLT

SEQ ID NO: 1025 - protein, 10 aa, Homo sapien
VLVHPQWVLT

SEQ ID NO: 1026 - protein, 11 aa, Homo sapien
VLVHPQWVLTA

SEQ ID NO: 1027 - protein, 11 aa, Homo sapien
VLVHPQWVLTA

SEQ ID NO: 1028 - protein, 10 aa, Homo sapien
VLVNEILNHM

SEQ ID NO: 1029 - protein, 10 aa, Homo sapien
VMDLPTQEPA

SEQ ID NO: 1030 - protein, 11 aa, Homo sapien
VMDLPTQEPAL

SEQ ID NO: 1031 - protein, 8 aa, Homo sapien
VQAAAETL

SEQ ID NO: 1032 - protein, 11 aa, Homo sapien
VQAAAETLSEV

SEQ ID NO: 1033 - protein, 9 aa, Homo sapien
VQRGNILNL

SEQ ID NO: 1034 - protein, 8 aa, Homo sapien
VTEFMLCA

SEQ ID NO: 1035 - protein, 10 aa, Homo sapien
VTEFMLCAGL

SEQ ID NO: 1036 - protein, 8 aa, Homo sapien
VTKFMLCA

SEQ ID NO: 1037 - protein, 8 aa, Homo sapien
VTRIYNVI

SEQ ID NO: 1038 - protein, 10 aa, Homo sapien
VTRIYNVIGT

SEQ ID NO: 1039 - protein, 11 aa, Homo sapien
VTRIYNVIGTL

SEQ ID NO: 1040 - protein, 9 aa, Homo sapien
VTWIGAAPL

SEQ ID NO: 1041 - protein, 10 aa, Homo sapien
VTWIGAAPLI

SEQ ID NO: 1042 - protein, 11 aa, Homo sapien
VTWIGAAPLIL

SEQ ID NO: 1043 - protein, 8 aa, Homo sapien
VVFLTLSV

SEQ ID NO: 1044 - protein, 9 aa, Homo sapien
VVFLTLSVT

SEQ ID NO: 1045 - protein, 11 aa, Homo sapien
VVFLTLSVTWI

SEQ ID NO: 1046 - protein, 11 aa, Homo sapien
VVHEIVRSFGT

SEQ ID NO: 1047 - protein, 8 aa, Homo sapien
VVHYRKWI

SEQ ID NO: 1048 - protein, 8 aa, Homo sapien
VVHYRKWI

SEQ ID NO: 1049 - protein, 11 aa, Homo sapien
VVHYRKWIKDT

SEQ ID NO: 1050 - protein, 11 aa, Homo sapien
VVHYRKWIKDT

SEQ ID NO: 1051 - protein, 9 aa, Homo sapien
VVKVLGLPT

SEQ ID NO: 1052 - protein, 10 aa, Homo sapien
VVLRKYADKI

SEQ ID NO: 1053 - protein, 8 aa, Homo sapien
WAEENSRL

SEQ ID NO: 1054 - protein, 9 aa, Homo sapien
WAEENSRLL

SEQ ID NO: 1055 - protein, 8 aa, Homo sapien
WAHCGGVL

SEQ ID NO: 1056 - protein, 9 aa, Homo sapien
WAHCGGVLV

SEQ ID NO: 1057 - protein, 8 aa, Homo sapien
WATEDTMT

SEQ ID NO: 1058 - protein, 10 aa, Homo sapien
WATEDTMTKL

SEQ ID NO: 1059 - protein, 8 aa, Homo sapien
WIGAAPLI

SEQ ID NO: 1060 - protein, 9 aa, Homo sapien
WIGAAPLIL

SEQ ID NO: 1061 - protein, 8 aa, Homo sapien
WIKDTIAA

SEQ ID NO: 1062 - protein, 8 aa, Homo sapien
WIKDTIVA

SEQ ID NO: 1063 - protein, 8 aa, Homo sapien
WLCAGALV

SEQ ID NO: 1064 - protein, 9 aa, Homo sapien
WLCAGALVL

SEQ ID NO: 1065 - protein, 10 aa, Homo sapien
WLCAGALVLA

SEQ ID NO: 1066 - protein, 8 aa, Homo sapien
WLDRSVLA

SEQ ID NO: 1067 - protein, 11 aa, Homo sapien
WLDRSVLAKEL

SEQ ID NO: 1068 - protein, 8 aa, Homo sapien
WQPIPVHT

SEQ ID NO: 1069 - protein, 9 aa, Homo sapien
WQPIPVHTV

SEQ ID NO: 1070 - protein, 11 aa, Homo sapien
WQPIPVHTVPL

SEQ ID NO: 1071 - protein, 11 aa, Homo sapien
WQVAVYSHGWA

SEQ ID NO: 1072 - protein, 11 aa, Homo sapien
WQVLVASRGRA

SEQ ID NO: 1073 - protein, 9 aa, Homo sapien
WVLTAAHCI

SEQ ID NO: 1074 - protein, 9 aa, Homo sapien
WVLTAAHCL

SEQ ID NO: 1075 - protein, 8 aa, Homo sapien
YADKIYSI

SEQ ID NO: 1076 - protein, 10 aa, Homo sapien
YADKIYSISM

SEQ ID NO: 1077 - protein, 9 aa, Homo sapien
YAGESFPGI

SEQ ID NO: 1078 - protein, 10 aa, Homo sapien
YAPSSHNKYA

SEQ ID NO: 1079 - protein, 10 aa, Homo sapien
YARTEDFFKL

SEQ ID NO: 1080 - protein, 9 aa, Homo sapien
YASCHLTEL

SEQ ID NO: 1081 - protein, 8 aa, Homo sapien
YASGWGSI

SEQ ID NO: 1082 - protein, 8 aa, Homo sapien
YASGWGSI

SEQ ID NO: 1083 - protein, 9 aa, Homo sapien
YAVVLRKYA

SEQ ID NO: 1084 - protein, 8 aa, Homo sapien
YAYRRGIA

SEQ ID NO: 1085 - protein, 10 aa, Homo sapien
YAYRRGIAEA

SEQ ID NO: 1086 - protein, 11 aa, Homo sapien
YAYRRGIAEAV

SEQ ID NO: 1087 - protein, 8 aa, Homo sapien
YINADSSI

SEQ ID NO: 1088 - protein, 10 aa, Homo sapien
YIRKRYRKFL

SEQ ID NO: 1089 - protein, 10 aa, Homo sapien
YIRSTDVDRT

SEQ ID NO: 1090 - protein, 11 aa, Homo sapien
YIRSTDVDRTL

SEQ ID NO: 1091 - protein, 11 aa, Homo sapien
YTKVVHYRKWI

SEQ ID NO: 1092 - protein, 11 aa, Homo sapien
YTKVVHYRKWI

SEQ ID NO: 1093 - protein, 8 aa, Homo sapien
YTLRVDCT

SEQ ID NO: 1094 - protein, 10 aa, Homo sapien
YTLRVDCTPL

SEQ ID NO: 1095 - protein, 11 aa, Homo sapien
YTLRVDCTPLM

SEQ ID NO: 1096 - protein, 9 aa, Homo sapien
YVAAFTVQA

SEQ ID NO: 1097 - protein, 10 aa, Homo sapien
YVAAFTVQAA

SEQ ID NO: 1098 - protein, 11 aa, Homo sapien
YVAAFTVQAAA

SEQ ID NO: 1099 - protein, 8 aa, Homo sapien
AAHCIRNK

SEQ ID NO: 1100 - protein, 8 aa, Homo sapien
AAPLILSR

SEQ ID NO: 1101 - protein, 8 aa, Homo sapien
AAPLLLAR

SEQ ID NO: 1102 - protein, 9 aa, Homo sapien
AAVVHEIVR

SEQ ID NO: 1103 - protein, 8 aa, Homo sapien
ALFDIESK

SEQ ID NO: 1104 - protein, 11 aa, Homo sapien
ALPEKPAVYTK

SEQ ID NO: 1105 - protein, 11 aa, Homo sapien
ALPERPSLYTK

SEQ ID NO: 1106 - protein, 9 aa, Homo sapien
ASGRARYTK

SEQ ID NO: 1107 - protein, 8 aa, Homo sapien
ATEDTMTK

SEQ ID NO: 1108 - protein, 10 aa, Homo sapien
ATEDTMTKLR

SEQ ID NO: 1109 - protein, 11 aa, Homo sapien
ATNITPKHNMK

SEQ ID NO: 1110 - protein, 8 aa, Homo sapien
ATQIPSYK

SEQ ID NO: 1111 - protein, 9 aa, Homo sapien
ATQIPSYKK

SEQ ID NO: 1112 - protein, 9 aa, Homo sapien
AVATARRPR

SEQ ID NO: 1113 - protein, 11 aa, Homo sapien
AVKNFTEIASK

SEQ ID NO: 1114 - protein, 8 aa, Homo sapien
AVPLIQSR

SEQ ID NO: 1115 - protein, 8 aa, Homo sapien
AVVHEIVR

SEQ ID NO: 1116 - protein, 10 aa, Homo sapien
AVVLRKYADK

SEQ ID NO: 1117 - protein, 10 aa, Homo sapien
AVYTKVVHYR

SEQ ID NO: 1118 - protein, 11 aa, Homo sapien
AVYTKVVHYRK

SEQ ID NO: 1119 - protein, 9 aa, Homo sapien
CAGLWTGGK

SEQ ID NO: 1120 - protein, 9 aa, Homo sapien
CAGRWTGGK

SEQ ID NO: 1121 - protein, 8 aa, Homo sapien
CAQVHPQK

SEQ ID NO: 1122 - protein, 11 aa, Homo sapien
CAQVHPQKVTK

SEQ ID NO: 1123 - protein, 8 aa, Homo sapien
CARAYSEK

SEQ ID NO: 1124 - protein, 9 aa, Homo sapien
CSGKIVIAR

SEQ ID NO: 1125 - protein, 9 aa, Homo sapien
CSPSCPLER

SEQ ID NO: 1126 - protein, 11 aa, Homo sapien
CTGAVPLIQSR

SEQ ID NO: 1127 - protein, 9 aa, Homo sapien
DALFDIESK

SEQ ID NO: 1128 - protein, 8 aa, Homo sapien
DAQKLLEK

SEQ ID NO: 1129 - protein, 10 aa, Homo sapien
DIESKVDPSK

SEQ ID NO: 1130 - protein, 8 aa, Homo sapien
DLFGIWSK

SEQ ID NO: 1131 - protein, 9 aa, Homo sapien
DLVYVNYAR

SEQ ID NO: 1132 - protein, 10 aa, Homo sapien
DMCARAYSEK

SEQ ID NO: 1133 - protein, 9 aa, Homo sapien
DMKINCSGK

SEQ ID NO: 1134 - protein, 8 aa, Homo sapien
DMSLLKNR

SEQ ID NO: 1135 - protein, 11 aa, Homo sapien
DMSLLKNRFLR

SEQ ID NO: 1136 - protein, 8 aa, Homo sapien
DSAVATAR

SEQ ID NO: 1137 - protein, 9 aa, Homo sapien
DSAVATARR

SEQ ID NO: 1138 - protein, 11 aa, Homo sapien
DSAVATARRPR

SEQ ID NO: 1139 - protein, 8 aa, Homo sapien
DSLFSAVK

SEQ ID NO: 1140 - protein, 10 aa, Homo sapien
DSSHDLMLLR

SEQ ID NO: 1141 - protein, 10 aa, Homo sapien
DSSHDLMLLR

SEQ ID NO: 1142 - protein, 11 aa, Homo sapien
DSSIEGNYTLR

SEQ ID NO: 1143 - protein, 9 aa, Homo sapien
DSSWRGSLK

SEQ ID NO: 1144 - protein, 9 aa, Homo sapien
DTFPTDPIK

SEQ ID NO: 1145 - protein, 10 aa, Homo sapien
DVCAQVHPQK

SEQ ID NO: 1146 - protein, 9 aa, Homo sapien
DVLLSYPNK

SEQ ID NO: 1147 - protein, 8 aa, Homo sapien
EATNITPK

SEQ ID NO: 1148 - protein, 9 aa, Homo sapien
EIASKFSER

SEQ ID NO: 1149 - protein, 8 aa, Homo sapien
EILNHMKR

SEQ ID NO: 1150 - protein, 10 aa, Homo sapien
EIVRSFGTLK

SEQ ID NO: 1151 - protein, 11 aa, Homo sapien
EIVRSFGTLKK

SEQ ID NO: 1152 - protein, 8 aa, Homo sapien
ELESETLK

SEQ ID NO: 1153 - protein, 8 aa, Homo sapien
ELGEYIRK

SEQ ID NO: 1154 - protein, 9 aa, Homo sapien
ELGEYIRKR

SEQ ID NO: 1155 - protein, 11 aa, Homo sapien
ELGEYIRKRYR

SEQ ID NO: 1156 - protein, 8 aa, Homo sapien
ELKAENIK

SEQ ID NO: 1157 - protein, 9 aa, Homo sapien
ELKAENIKK

SEQ ID NO: 1158 - protein, 10 aa, Homo sapien
ELKFVTLVFR

SEQ ID NO: 1159 - protein, 8 aa, Homo sapien
ESKVDPSK

SEQ ID NO: 1160 - protein, 11 aa, Homo sapien
ESYKHEQVYIR

SEQ ID NO: 1161 - protein, 10 aa, Homo sapien
ETDSAVATAR

SEQ ID NO: 1162 - protein, 11 aa, Homo sapien
ETDSAVATARR

SEQ ID NO: 1163 - protein, 10 aa, Homo sapien
ETLKSEEFQK

SEQ ID NO: 1164 - protein, 11 aa, Homo sapien
ETLKSEEFQKR

SEQ ID NO: 1165 - protein, 8 aa, Homo sapien
ETYELVEK

SEQ ID NO: 1166 - protein, 10 aa, Homo sapien
FIDPLGLPDR

SEQ ID NO: 1167 - protein, 11 aa, Homo sapien
FLDELKAENIK

SEQ ID NO: 1168 - protein, 8 aa, Homo sapien
FLFGWFIK

SEQ ID NO: 1169 - protein, 11 aa, Homo sapien
FLFLLFFWLDR

SEQ ID NO: 1170 - protein, 9 aa, Homo sapien
FLLFFWLDR

SEQ ID NO: 1171 - protein, 10 aa, Homo sapien
FSERLQDFDK

SEQ ID NO: 1172 - protein, 9 aa, Homo sapien
FSGMPRISK

SEQ ID NO: 1173 - protein, 11 aa, Homo sapien
FTEIASKFSER

SEQ ID NO: 1174 - protein, 9 aa, Homo sapien
FTGNFSTQK

SEQ ID NO: 1175 - protein, 11 aa, Homo sapien
FTGNFSTQKVK

SEQ ID NO: 1176 - protein, 11 aa, Homo sapien
FVTLVFRHGDR

SEQ ID NO: 1177 - protein, 9 aa, Homo sapien
GAAPLILSR

SEQ ID NO: 1178 - protein, 10 aa, Homo sapien
GAAVVHEIVR

SEQ ID NO: 1179 - protein, 9 aa, Homo sapien
GAVPLIQSR

SEQ ID NO: 1180 - protein, 8 aa, Homo sapien
GIASGRAR

SEQ ID NO: 1181 - protein, 11 aa, Homo sapien
GIASGRARYTK

SEQ ID NO: 1182 - protein, 8 aa, Homo sapien
GIHKQKEK

SEQ ID NO: 1183 - protein, 10 aa, Homo sapien
GIHKQKEKSR

SEQ ID NO: 1184 - protein, 9 aa, Homo sapien
GLPDRPFYR

SEQ ID NO: 1185 - protein, 10 aa, Homo sapien
GSAPPDSSWR

SEQ ID NO: 1186 - protein, 10 aa, Homo sapien
GSEPCALPER

SEQ ID NO: 1187 - protein, 10 aa, Homo sapien
GSIEPEEFLR

SEQ ID NO: 1188 - protein, 11 aa, Homo sapien
GSTEWAEENSR

SEQ ID NO: 1189 - protein, 10 aa, Homo sapien
GTEQNFQLAK

SEQ ID NO: 1190 - protein, 9 aa, Homo sapien
GTLKKEGWR

SEQ ID NO: 1191 - protein, 11 aa, Homo sapien
GTLKKEGWRPR

SEQ ID NO: 1192 - protein, 11 aa, Homo sapien
GTLRGAVEPDR

SEQ ID NO: 1193 - protein, 10 aa, Homo sapien
HIHSTNEVTR

SEQ ID NO: 1194 - protein, 10 aa, Homo sapien
HLLSNDMCAR

SEQ ID NO: 1195 - protein, 9 aa, Homo sapien
HLTELYFEK

SEQ ID NO: 1196 - protein, 8 aa, Homo sapien
HLTVAQVR

SEQ ID NO: 1197 - protein, 8 aa, Homo sapien
HSTNEVTR

SEQ ID NO: 1198 - protein, 11 aa, Homo sapien
HVIYAPSSHNK

SEQ ID NO: 1199 - protein, 9 aa, Homo sapien
IARYGKVFR

SEQ ID NO: 1200 - protein, 10 aa, Homo sapien
IASGRARYTK

SEQ ID NO: 1201 - protein, 8 aa, Homo sapien
IASKFSER

SEQ ID NO: 1202 - protein, 10 aa, Homo sapien
ISMKHPQEMK

SEQ ID NO: 1203 - protein, 8 aa, Homo sapien
ITPKHNMK

SEQ ID NO: 1204 - protein, 9 aa, Homo sapien
IVGGWECEK

SEQ ID NO: 1205 - protein, 9 aa, Homo sapien
IVGGWECEK

SEQ ID NO: 1206 - protein, 8 aa, Homo sapien
IVIARYGK

SEQ ID NO: 1207 - protein, 11 aa, Homo sapien
IVIARYGKVFR

SEQ ID NO: 1208 - protein, 8 aa, Homo sapien
IVLPFDCR

SEQ ID NO: 1209 - protein, 9 aa, Homo sapien
IVRSFGTLK

SEQ ID NO: 1210 - protein, 10 aa, Homo sapien
IVRSFGTLKK

SEQ ID NO: 1211 - protein, 8 aa, Homo sapien
KAFLDELK

SEQ ID NO: 1212 - protein, 8 aa, Homo sapien
KAWGEVKR

SEQ ID NO: 1213 - protein, 9 aa, Homo sapien
KIVIARYGK

SEQ ID NO: 1214 - protein, 8 aa, Homo sapien
KIYSISMK

SEQ ID NO: 1215 - protein, 8 aa, Homo sapien
KSEEFQKR

SEQ ID NO: 1216 - protein, 9 aa, Homo sapien
KSLYESWTK

SEQ ID NO: 1217 - protein, 10 aa, Homo sapien
KSLYESWTKK

SEQ ID NO: 1218 - protein, 8 aa, Homo sapien
KSNPIVLR

SEQ ID NO: 1219 - protein, 10 aa, Homo sapien
KSPDEGFEGK

SEQ ID NO: 1220 - protein, 8 aa, Homo sapien
KSVILLGR

SEQ ID NO: 1221 - protein, 9 aa, Homo sapien
KVFRGNKVK

SEQ ID NO: 1222 - protein, 11 aa, Homo sapien
KVKNAQLAGAK

SEQ ID NO: 1223 - protein, 11 aa, Homo sapien
KVTKFMLCAGR

SEQ ID NO: 1224 - protein, 10 aa, Homo sapien
KVVHYRKWIK

SEQ ID NO: 1225 - protein, 10 aa, Homo sapien
KVVHYRKWIK

SEQ ID NO: 1226 - protein, 10 aa, Homo sapien
LAKQIQSQWK

SEQ ID NO: 1227 - protein, 8 aa, Homo sapien
LLFFWLDR

SEQ ID NO: 1228 - protein, 11 aa, Homo sapien
LLGFLFGWFIK

SEQ ID NO: 1229 - protein, 8 aa, Homo sapien
LLKHQSLR

SEQ ID NO: 1230 - protein, 8 aa, Homo sapien
LLKNRFLR

SEQ ID NO: 1231 - protein, 9 aa, Homo sapien
LLRLSEPAK

SEQ ID NO: 1232 - protein, 9 aa, Homo sapien
LLSLYGIHK

SEQ ID NO: 1233 - protein, 11 aa, Homo sapien
LLSLYGIHKQK

SEQ ID NO: 1234 - protein, 9 aa, Homo sapien
LLSNDMCAR

SEQ ID NO: 1235 - protein, 11 aa, Homo sapien
LLYLPFRNCPR

SEQ ID NO: 1236 - protein, 11 aa, Homo sapien
LMLLRLSEPAK

SEQ ID NO: 1237 - protein, 11 aa, Homo sapien
LMYSLVHNLTK

SEQ ID NO: 1238 - protein, 11 aa, Homo sapien
LSLLSLYGIHK

SEQ ID NO: 1239 - protein, 8 aa, Homo sapien
LSLYGIHK

SEQ ID NO: 1240 - protein, 10 aa, Homo sapien
LSLYGIHKQK

SEQ ID NO: 1241 - protein, 8 aa, Homo sapien
LSNDMCAR

SEQ ID NO: 1242 - protein, 8 aa, Homo sapien
LTAAHCIR

SEQ ID NO: 1243 - protein, 10 aa, Homo sapien
LTAAHCIRNK

SEQ ID NO: 1244 - protein, 8 aa, Homo sapien
LTAAHCLK

SEQ ID NO: 1245 - protein, 9 aa, Homo sapien
LTAAHCLKK

SEQ ID NO: 1246 - protein, 8 aa, Homo sapien
LTELYFEK

SEQ ID NO: 1247 - protein, 11 aa, Homo sapien
LVEKFYDPMFK

SEQ ID NO: 1248 - protein, 8 aa, Homo sapien
LVFRHGDR

SEQ ID NO: 1249 - protein, 10 aa, Homo sapien
LVHNLTKELK

SEQ ID NO: 1250 - protein, 10 aa, Homo sapien
LVNEILNHMK

SEQ ID NO: 1251 - protein, 11 aa, Homo sapien
LVNEILNHMKR

SEQ ID NO: 1252 - protein, 8 aa, Homo sapien
LVYVNYAR

SEQ ID NO: 1253 - protein, 11 aa, Homo sapien
MLCAGLWTGGK

SEQ ID NO: 1254 - protein, 11 aa, Homo sapien
MLCAGRWTGGK

SEQ ID NO: 1255 - protein, 10 aa, Homo sapien
MLLRLSEPAK

SEQ ID NO: 1256 - protein, 11 aa, Homo sapien
MMNDQLMFLER

SEQ ID NO: 1257 - protein, 10 aa, Homo sapien
MSLLKHQSLR

SEQ ID NO: 1258 - protein, 10 aa, Homo sapien
MSLLKNRFLR

SEQ ID NO: 1259 - protein, 8 aa, Homo sapien
NAQLAGAK

SEQ ID NO: 1260 - protein, 9 aa, Homo sapien
NITPKHNMK

SEQ ID NO: 1261 - protein, 11 aa, Homo sapien
NLFEPEDTGQR

SEQ ID NO: 1262 - protein, 9 aa, Homo sapien
NLPGGGVQR

SEQ ID NO: 1263 - protein, 10 aa, Homo sapien
NMKAFLDELK

SEQ ID NO: 1264 - protein, 11 aa, Homo sapien
NMSLLKHQSLR

SEQ ID NO: 1265 - protein, 10 aa, Homo sapien
NSIVLPFDCR

SEQ ID NO: 1266 - protein, 8 aa, Homo sapien
NSQVWLGR

SEQ ID NO: 1267 - protein, 8 aa, Homo sapien
NSRLLQER

SEQ ID NO: 1268 - protein, 10 aa, Homo sapien
PADYFAPGVK

SEQ ID NO: 1269 - protein, 9 aa, Homo sapien
PAELTDAVK

SEQ ID NO: 1270 - protein, 9 aa, Homo sapien
PAKITDVVK

SEQ ID NO: 1271 - protein, 8 aa, Homo sapien
PANEYAYR

SEQ ID NO: 1272 - protein, 9 aa, Homo sapien
PANEYAYRR

SEQ ID NO: 1273 - protein, 11 aa, Homo sapien
PAVYTKVVHYR

SEQ ID NO: 1274 - protein, 11 aa, Homo sapien
PIDTFPTDPIK

SEQ ID NO: 1275 - protein, 9 aa, Homo sapien
PIGYYDAQK

SEQ ID NO: 1276 - protein, 11 aa, Homo sapien
PLGLPDRPFYR

SEQ ID NO: 1277 - protein, 9 aa, Homo sapien
PLYDMSLLK

SEQ ID NO: 1278 - protein, 11 aa, Homo sapien
PLYDMSLLKNR

SEQ ID NO: 1279 - protein, 9 aa, Homo sapien
PLYNMSLLK

SEQ ID NO: 1280 - protein, 9 aa, Homo sapien
PSKAWGEVK

SEQ ID NO: 1281 - protein, 10 aa, Homo sapien
PSKAWGEVKR

SEQ ID NO: 1282 - protein, 11 aa, Homo sapien
PSLYTKVVHYR

SEQ ID NO: 1283 - protein, 10 aa, Homo sapien
PSPEFSGMPR

SEQ ID NO: 1284 - protein, 11 aa, Homo sapien
PSWATEDTMTK

SEQ ID NO: 1285 - protein, 11 aa, Homo sapien
QLAKQIQSQWK

SEQ ID NO: 1286 - protein, 8 aa, Homo sapien
QLLYLPFR

SEQ ID NO: 1287 - protein, 9 aa, Homo sapien
QVHPQKVTK

SEQ ID NO: 1288 - protein, 9 aa, Homo sapien
QVLVASRGR

SEQ ID NO: 1289 - protein, 11 aa, Homo sapien
QVYIRSTDVDR

SEQ ID NO: 1290 - protein, 9 aa, Homo sapien
RAAPLLLAR

SEQ ID NO: 1291 - protein, 9 aa, Homo sapien
RATQIPSYK

SEQ ID NO: 1292 - protein, 10 aa, Homo sapien
RATQIPSYKK

SEQ ID NO: 1293 - protein, 10 aa, Homo sapien
RIVGGWECEK

SEQ ID NO: 1294 - protein, 10 aa, Homo sapien
RIVGGWECEK

SEQ ID NO: 1295 - protein, 10 aa, Homo sapien
RIYNVIGTLR

SEQ ID NO: 1296 - protein, 8 aa, Homo sapien
RLGIASGR

SEQ ID NO: 1297 - protein, 10 aa, Homo sapien
RLGIASGRAR

SEQ ID NO: 1298 - protein, 8 aa, Homo sapien
RSFGTLKK

SEQ ID NO: 1299 - protein, 9 aa, Homo sapien
RSVLAKELK

SEQ ID NO: 1300 - protein, 10 aa, Homo sapien
RTEDFFKLER

SEQ ID NO: 1301 - protein, 9 aa, Homo sapien
SAPPDSSWR

SEQ ID NO: 1302 - protein, 8 aa, Homo sapien
SAVATARR

SEQ ID NO: 1303 - protein, 10 aa, Homo sapien
SAVATARRPR

SEQ ID NO: 1304 - protein, 9 aa, Homo sapien
SIEGNYTLR

SEQ ID NO: 1305 - protein, 9 aa, Homo sapien
SIEPEEFLR

SEQ ID NO: 1306 - protein, 11 aa, Homo sapien
SIEPEEFLRPR

SEQ ID NO: 1307 - protein, 11 aa, Homo sapien
SIEPEEFLTPK

SEQ ID NO: 1308 - protein, 11 aa, Homo sapien
SISMKHPQEMK

SEQ ID NO: 1309 - protein, 9 aa, Homo sapien
SIVLPFDCR

SEQ ID NO: 1310 - protein, 9 aa, Homo sapien
SLLKHQSLR

SEQ ID NO: 1311 - protein, 9 aa, Homo sapien
SLLKNRFLR

SEQ ID NO: 1312 - protein, 10 aa, Homo sapien
SLLSLYGIHK

SEQ ID NO: 1313 - protein, 8 aa, Homo sapien
SLVHNLTK

SEQ ID NO: 1314 - protein, 11 aa, Homo sapien
SLVHNLTKELK

SEQ ID NO: 1315 - protein, 8 aa, Homo sapien
SLYESWTK

SEQ ID NO: 1316 - protein, 9 aa, Homo sapien
SLYESWTKK

SEQ ID NO: 1317 - protein, 9 aa, Homo sapien
SLYGIHKQK

SEQ ID NO: 1318 - protein, 11 aa, Homo sapien
SLYGIHKQKEK

SEQ ID NO: 1319 - protein, 10 aa, Homo sapien
SLYTKVVHYR

SEQ ID NO: 1320 - protein, 11 aa, Homo sapien
SLYTKVVHYRK

SEQ ID NO: 1321 - protein, 9 aa, Homo sapien
SMKHPQEMK

SEQ ID NO: 1322 - protein, 9 aa, Homo sapien
SSHDLMLLR

SEQ ID NO: 1323 - protein, 9 aa, Homo sapien
SSHDLMLLR

SEQ ID NO: 1324 - protein, 10 aa, Homo sapien
SSIEGNYTLR

SEQ ID NO: 1325 - protein, 11 aa, Homo sapien
SSNEATNITPK

SEQ ID NO: 1326 - protein, 8 aa, Homo sapien
SSWRGSLK

SEQ ID NO: 1327 - protein, 10 aa, Homo sapien
STEWAEENSR

SEQ ID NO: 1328 - protein, 8 aa, Homo sapien
SVLAKELK

SEQ ID NO: 1329 - protein, 11 aa, Homo sapien
SVYETYELVEK

SEQ ID NO: 1330 - protein, 9 aa, Homo sapien
TAAHCIRNK

SEQ ID NO: 1331 - protein, 8 aa, Homo sapien
TAAHCLKK

SEQ ID NO: 1332 - protein, 8 aa, Homo sapien
TLKKEGWR

SEQ ID NO: 1333 - protein, 10 aa, Homo sapien
TLKKEGWRPR

SEQ ID NO: 1334 - protein, 11 aa, Homo sapien
TLKKEGWRPRR

SEQ ID NO: 1335 - protein, 9 aa, Homo sapien
TLKSEEFQK

SEQ ID NO: 1336 - protein, 10 aa, Homo sapien
TLKSEEFQKR

SEQ ID NO: 1337 - protein, 10 aa, Homo sapien
TLRGAVEPDR

SEQ ID NO: 1338 - protein, 9 aa, Homo sapien
TLVFRHGDR

SEQ ID NO: 1339 - protein, 8 aa, Homo sapien
VATARRPR

SEQ ID NO: 1340 - protein, 10 aa, Homo sapien
VIARYGKVFR

SEQ ID NO: 1341 - protein, 10 aa, Homo sapien
VIYAPSSHNK

SEQ ID NO: 1342 - protein, 8 aa, Homo sapien
VLLSYPNK

SEQ ID NO: 1343 - protein, 8 aa, Homo sapien
VLRKYADK

SEQ ID NO: 1344 - protein, 9 aa, Homo sapien
VLTAAHCIR

SEQ ID NO: 1345 - protein, 11 aa, Homo sapien
VLTAAHCIRNK

SEQ ID NO: 1346 - protein, 9 aa, Homo sapien
VLTAAHCLK

SEQ ID NO: 1347 - protein, 10 aa, Homo sapien
VLTAAHCLKK

SEQ ID NO: 1348 - protein, 8 aa, Homo sapien
VLVASRGR

SEQ ID NO: 1349 - protein, 11 aa, Homo sapien
VLVNEILNHMK

SEQ ID NO: 1350 - protein, 11 aa, Homo sapien
VSFDSLFSAVK

SEQ ID NO: 1351 - protein, 10 aa, Homo sapien
VTKFMLCAGR

SEQ ID NO: 1352 - protein, 10 aa, Homo sapien
VTLVFRHGDR

SEQ ID NO: 1353 - protein, 9 aa, Homo sapien
VVHYRKWIK

SEQ ID NO: 1354 - protein, 9 aa, Homo sapien
VVHYRKWIK

SEQ ID NO: 1355 - protein, 9 aa, Homo sapien
VVLRKYADK

SEQ ID NO: 1356 - protein, 9 aa, Homo sapien
WATEDTMTK

SEQ ID NO: 1357 - protein, 11 aa, Homo sapien
WATEDTMTKLR

SEQ ID NO: 1358 - protein, 11 aa, Homo sapien
WIGAAPLILSR

SEQ ID NO: 1359 - protein, 9 aa, Homo sapien
WLDRSVLAK

SEQ ID NO: 1360 - protein, 10 aa, Homo sapien
WVLTAAHCIR

SEQ ID NO: 1361 - protein, 10 aa, Homo sapien
WVLTAAHCLK

SEQ ID NO: 1362 - protein, 11 aa, Homo sapien
WVLTAAHCLKK

SEQ ID NO: 1363 - protein, 11 aa, Homo sapien
YADKIYSISMK

SEQ ID NO: 1364 - protein, 8 aa, Homo sapien
YAPSSHNK

SEQ ID NO: 1365 - protein, 9 aa, Homo sapien
YARTEDFFK

SEQ ID NO: 1366 - protein, 11 aa, Homo sapien
YAVVLRKYADK

SEQ ID NO: 1367 - protein, 8 aa, Homo sapien
YIRKRYRK

SEQ ID NO: 1368 - protein, 9 aa, Homo sapien
YIRSTDVDR

SEQ ID NO: 1369 - protein, 9 aa, Homo sapien
YLPFRNCPR

SEQ ID NO: 1370 - protein, 9 aa, Homo sapien
YSLVHNLTK

SEQ ID NO: 1371 - protein, 9 aa, Homo sapien
YTKNWETNK

SEQ ID NO: 1372 - protein, 8 aa, Homo sapien
YTKVVHYR

SEQ ID NO: 1373 - protein, 8 aa, Homo sapien
YTKVVHYR

SEQ ID NO: 1374 - protein, 9 aa, Homo sapien
YTKVVHYRK

SEQ ID NO: 1375 - protein, 9 aa, Homo sapien
YTKVVHYRK

SEQ ID NO: 1376 - protein, 8 aa, Homo sapien
YVILGGHR

SEQ ID NO: 1377 - protein, 8 aa, Homo sapien
AFIDPLGL

SEQ ID NO: 1378 - protein, 11 aa, Homo sapien
AFLDELKAENI

SEQ ID NO: 1379 - protein, 11 aa, Homo sapien
AFTVQAAAETL

SEQ ID NO: 1380 - protein, 8 aa, Homo sapien
ALDVYNGL

SEQ ID NO: 1381 - protein, 9 aa, Homo sapien
ALDVYNGLL

SEQ ID NO: 1382 - protein, 10 aa, Homo sapien
ALFPPEGVSI

SEQ ID NO: 1383 - protein, 11 aa, Homo sapien
ALFPPEGVSIW

SEQ ID NO: 1384 - protein, 11 aa, Homo sapien
ALGTTCYASGW

SEQ ID NO: 1385 - protein, 11 aa, Homo sapien
ALGTTCYASGW

SEQ ID NO: 1386 - protein, 9 aa, Homo sapien
ALPEKPAVY

SEQ ID NO: 1387 - protein, 8 aa, Homo sapien
ALPERPSL

SEQ ID NO: 1388 - protein, 9 aa, Homo sapien
ALPERPSLY

SEQ ID NO: 1389 - protein, 8 aa, Homo sapien
ALVLAGGF

SEQ ID NO: 1390 - protein, 9 aa, Homo sapien
ALVLAGGFF

SEQ ID NO: 1391 - protein, 10 aa, Homo sapien
ALVLAGGFFL

SEQ ID NO: 1392 - protein, 11 aa, Homo sapien
ALVLAGGFFLL

SEQ ID NO: 1393 - protein, 8 aa, Homo sapien
AMTNLAAL

SEQ ID NO: 1394 - protein, 9 aa, Homo sapien
AMTNLAALF

SEQ ID NO: 1395 - protein, 8 aa, Homo sapien
ATARRPRW

SEQ ID NO: 1396 - protein, 9 aa, Homo sapien
ATARRPRWL

SEQ ID NO: 1397 - protein, 9 aa, Homo sapien
ATEDTMTKL

SEQ ID NO: 1398 - protein, 9 aa, Homo sapien
ATLGKLSGL

SEQ ID NO: 1399 - protein, 10 aa, Homo sapien
ATNITPKHNM

SEQ ID NO: 1400 - protein, 10 aa, Homo sapien
ATQIPSYKKL

SEQ ID NO: 1401 - protein, 11 aa, Homo sapien
ATQIPSYKKLI

SEQ ID NO: 1402 - protein, 10 aa, Homo sapien
AVATARRPRW

SEQ ID NO: 1403 - protein, 11 aa, Homo sapien
AVATARRPRWL

SEQ ID NO: 1404 - protein, 9 aa, Homo sapien
AVEPDRYVI

SEQ ID NO: 1405 - protein, 10 aa, Homo sapien
AVEPDRYVIL

SEQ ID NO: 1406 - protein, 8 aa, Homo sapien
AVKNFTEI

SEQ ID NO: 1407 - protein, 9 aa, Homo sapien
AVPLIQSRI

SEQ ID NO: 1408 - protein, 10 aa, Homo sapien
AVVHEIVRSF

SEQ ID NO: 1409 - protein, 11 aa, Homo sapien
AVVLRKYADKI

SEQ ID NO: 1410 - protein, 9 aa, Homo sapien
AVYTKVVHY

SEQ ID NO: 1411 - protein, 9 aa, Homo sapien
AWGEVKRQI

SEQ ID NO: 1412 - protein, 10 aa, Homo sapien
AWGEVKRQIY

SEQ ID NO: 1413 - protein, 9 aa, Homo sapien
AYINADSSI

SEQ ID NO: 1414 - protein, 9 aa, Homo sapien
AYSEKVTEF

SEQ ID NO: 1415 - protein, 10 aa, Homo sapien
AYSEKVTEFM

SEQ ID NO: 1416 - protein, 11 aa, Homo sapien
AYSEKVTEFML

SEQ ID NO: 1417 - protein, 8 aa, Homo sapien
CIRNKSVI

SEQ ID NO: 1418 - protein, 9 aa, Homo sapien
CIRNKSVIL

SEQ ID NO: 1419 - protein, 10 aa, Homo sapien
CIRNKSVILL

SEQ ID NO: 1420 - protein, 9 aa, Homo sapien
CLKKNSQVW

SEQ ID NO: 1421 - protein, 10 aa, Homo sapien
CLKKNSQVWL

SEQ ID NO: 1422 - protein, 8 aa, Homo sapien
CTGAVPLI

SEQ ID NO: 1423 - protein, 8 aa, Homo sapien
CTPLMYSL

SEQ ID NO: 1424 - protein, 11 aa, Homo sapien
CVSLHLLSNDM

SEQ ID NO: 1425 - protein, 9 aa, Homo sapien
CYASGWGSI

SEQ ID NO: 1426 - protein, 9 aa, Homo sapien
CYASGWGSI

SEQ ID NO: 1427 - protein, 8 aa, Homo sapien
DFDKSNPI

SEQ ID NO: 1428 - protein, 10 aa, Homo sapien
DFDKSNPIVL

SEQ ID NO: 1429 - protein, 9 aa, Homo sapien
DFEVFFQRL

SEQ ID NO: 1430 - protein, 11 aa, Homo sapien
DFEVFFQRLGI

SEQ ID NO: 1431 - protein, 9 aa, Homo sapien
DFFKLERDM

SEQ ID NO: 1432 - protein, 11 aa, Homo sapien
DFFKLERDMKI

SEQ ID NO: 1433 - protein, 9 aa, Homo sapien
DFIATLGKL

SEQ ID NO: 1434 - protein, 9 aa, Homo sapien
DIVPPFSAF

SEQ ID NO: 1435 - protein, 10 aa, Homo sapien
DLFGIWSKVY

SEQ ID NO: 1436 - protein, 9 aa, Homo sapien
DLPTQEPAL

SEQ ID NO: 1437 - protein, 8 aa, Homo sapien
DLVLSIAL

SEQ ID NO: 1438 - protein, 10 aa, Homo sapien
DMKINCSGKI

SEQ ID NO: 1439 - protein, 9 aa, Homo sapien
DMSLLKNRF

SEQ ID NO: 1440 - protein, 10 aa, Homo sapien
DMSLLKNRFL

SEQ ID NO: 1441 - protein, 11 aa, Homo sapien
DTCGGDSGGPL

SEQ ID NO: 1442 - protein, 8 aa, Homo sapien
DTFPTDPI

SEQ ID NO: 1443 - protein, 9 aa, Homo sapien
DTMTKLREL

SEQ ID NO: 1444 - protein, 9 aa, Homo sapien
DTTVSGLQM

SEQ ID NO: 1445 - protein, 11 aa, Homo sapien
DTTVSGLQMAL

SEQ ID NO: 1446 - protein, 10 aa, Homo sapien
DVDRTLMSAM

SEQ ID NO: 1447 - protein, 8 aa, Homo sapien
DVVKVLGL

SEQ ID NO: 1448 - protein, 10 aa, Homo sapien
DVYNGLLPPY

SEQ ID NO: 1449 - protein, 9 aa, Homo sapien
DYAVVLRKY

SEQ ID NO: 1450 - protein, 10 aa, Homo sapien
DYFAPGVKSY

SEQ ID NO: 1451 - protein, 9 aa, Homo sapien
EFGLDSVEL

SEQ ID NO: 1452 - protein, 10 aa, Homo sapien
EFGLLGSTEW

SEQ ID NO: 1453 - protein, 8 aa, Homo sapien
EFLRPRSL

SEQ ID NO: 1454 - protein, 8 aa, Homo sapien
EFLTPKKL

SEQ ID NO: 1455 - protein, 8 aa, Homo sapien
EFMLCAGL

SEQ ID NO: 1456 - protein, 9 aa, Homo sapien
EFMLCAGLW

SEQ ID NO: 1457 - protein, 9 aa, Homo sapien
EFQKRLHPY

SEQ ID NO: 1458 - protein, 8 aa, Homo sapien
EFSGMPRI

SEQ ID NO: 1459 - protein, 11 aa, Homo sapien
EFSGMPRISKL

SEQ ID NO: 1460 - protein, 10 aa, Homo sapien
EIASKFSERL

SEQ ID NO: 1461 - protein, 8 aa, Homo sapien
EIFNTSLF

SEQ ID NO: 1462 - protein, 9 aa, Homo sapien
EIVRSFGTL

SEQ ID NO: 1463 - protein, 8 aa, Homo sapien
ELAHYDVL

SEQ ID NO: 1464 - protein, 9 aa, Homo sapien
ELAHYDVLL

SEQ ID NO: 1465 - protein, 11 aa, Homo sapien
ELAHYDVLLSY

SEQ ID NO: 1466 - protein, 8 aa, Homo sapien
ELANSIVL

SEQ ID NO: 1467 - protein, 10 aa, Homo sapien
ELANSIVLPF

SEQ ID NO: 1468 - protein, 10 aa, Homo sapien
ELGEYIRKRY

SEQ ID NO: 1469 - protein, 10 aa, Homo sapien
ELKAENIKKF

SEQ ID NO: 1470 - protein, 11 aa, Homo sapien
ELKAENIKKFL

SEQ ID NO: 1471 - protein, 9 aa, Homo sapien
ELKFVTLVF

SEQ ID NO: 1472 - protein, 9 aa, Homo sapien
ELKSPDEGF

SEQ ID NO: 1473 - protein, 8 aa, Homo sapien
ELSELSLL

SEQ ID NO: 1474 - protein, 10 aa, Homo sapien
ELSELSLLSL

SEQ ID NO: 1475 - protein, 11 aa, Homo sapien
ELSELSLLSLY

SEQ ID NO: 1476 - protein, 8 aa, Homo sapien
ELSLLSLY

SEQ ID NO: 1477 - protein, 10 aa, Homo sapien
ELSLLSLYGI

SEQ ID NO: 1478 - protein, 9 aa, Homo sapien
ELTDAVKVM

SEQ ID NO: 1479 - protein, 11 aa, Homo sapien
ELTDAVKVMDL

SEQ ID NO: 1480 - protein, 10 aa, Homo sapien
ELVEKFYDPM

SEQ ID NO: 1481 - protein, 11 aa, Homo sapien
ELVEKFYDPMF

SEQ ID NO: 1482 - protein, 11 aa, Homo sapien
ELVGPVIPQDW

SEQ ID NO: 1483 - protein, 9 aa, Homo sapien
ELYFEKGEY

SEQ ID NO: 1484 - protein, 10 aa, Homo sapien
ELYFEKGEYF

SEQ ID NO: 1485 - protein, 9 aa, Homo sapien
EMKTYSVSF

SEQ ID NO: 1486 - protein, 8 aa, Homo sapien
ETLKSEEF

SEQ ID NO: 1487 - protein, 8 aa, Homo sapien
ETNKFSGY

SEQ ID NO: 1488 - protein, 10 aa, Homo sapien
ETNKFSGYPL

SEQ ID NO: 1489 - protein, 11 aa, Homo sapien
ETNKFSGYPLY

SEQ ID NO: 1490 - protein, 9 aa, Homo sapien
ETQHEPYPL

SEQ ID NO: 1491 - protein, 10 aa, Homo sapien
ETQHEPYPLM

SEQ ID NO: 1492 - protein, 11 aa, Homo sapien
ETQHEPYPLML

SEQ ID NO: 1493 - protein, 9 aa, Homo sapien
ETYELVEKF

SEQ ID NO: 1494 - protein, 10 aa, Homo sapien
ETYELVEKFY

SEQ ID NO: 1495 - protein, 9 aa, Homo sapien
EVFFQRLGI

SEQ ID NO: 1496 - protein, 11 aa, Homo sapien
EVKRQIYVAAF

SEQ ID NO: 1497 - protein, 9 aa, Homo sapien
EVTRIYNVI

SEQ ID NO: 1498 - protein, 9 aa, Homo sapien
EWAEENSRL

SEQ ID NO: 1499 - protein, 10 aa, Homo sapien
EWAEENSRLL

SEQ ID NO: 1500 - protein, 8 aa, Homo sapien
EYAYRRGI

SEQ ID NO: 1501 - protein, 8 aa, Homo sapien
EYFVEMYY

SEQ ID NO: 1502 - protein, 10 aa, Homo sapien
EYIRKRYRKF

SEQ ID NO: 1503 - protein, 11 aa, Homo sapien
EYIRKRYRKFL

SEQ ID NO: 1504 - protein, 8 aa, Homo sapien
FFKLERDM

SEQ ID NO: 1505 - protein, 10 aa, Homo sapien
FFKLERDMKI

SEQ ID NO: 1506 - protein, 8 aa, Homo sapien
FFLLGFLF

SEQ ID NO: 1507 - protein, 10 aa, Homo sapien
FFLLGFLFGW

SEQ ID NO: 1508 - protein, 11 aa, Homo sapien
FFLLGFLFGWF

SEQ ID NO: 1509 - protein, 9 aa, Homo sapien
FFWLDRSVL

SEQ ID NO: 1510 - protein, 8 aa, Homo sapien
FIATLGKL

SEQ ID NO: 1511 - protein, 11 aa, Homo sapien
FIATLGKLSGL

SEQ ID NO: 1512 - protein, 11 aa, Homo sapien
FIKSSNEATNI

SEQ ID NO: 1513 - protein, 10 aa, Homo sapien
FLDELKAENI

SEQ ID NO: 1514 - protein, 10 aa, Homo sapien
FLERAFIDPL

SEQ ID NO: 1515 - protein, 8 aa, Homo sapien
FLFLLFFW

SEQ ID NO: 1516 - protein, 9 aa, Homo sapien
FLFLLFFWL

SEQ ID NO: 1517 - protein, 9 aa, Homo sapien
FLLGFLFGW

SEQ ID NO: 1518 - protein, 10 aa, Homo sapien
FLLGFLFGWF

SEQ ID NO: 1519 - protein, 11 aa, Homo sapien
FLLGFLFGWFI

SEQ ID NO: 1520 - protein, 8 aa, Homo sapien
FLTLSVTW

SEQ ID NO: 1521 - protein, 9 aa, Homo sapien
FLTLSVTWI

SEQ ID NO: 1522 - protein, 8 aa, Homo sapien
FLYNFTQI

SEQ ID NO: 1523 - protein, 11 aa, Homo sapien
FLYNFTQIPHL

SEQ ID NO: 1524 - protein, 8 aa, Homo sapien
FMLCAGLW

SEQ ID NO: 1525 - protein, 8 aa, Homo sapien
FMLCAGRW

SEQ ID NO: 1526 - protein, 8 aa, Homo sapien
FTEIASKF

SEQ ID NO: 1527 - protein, 10 aa, Homo sapien
FTVQAAAETL

SEQ ID NO: 1528 - protein, 8 aa, Homo sapien
FWLDRSVL

SEQ ID NO: 1529 - protein, 8 aa, Homo sapien
FYDPMFKY

SEQ ID NO: 1530 - protein, 10 aa, Homo sapien
FYDPMFKYHL

SEQ ID NO: 1531 - protein, 8 aa, Homo sapien
GFEGKSLY

SEQ ID NO: 1532 - protein, 11 aa, Homo sapien
GFEGKSLYESW

SEQ ID NO: 1533 - protein, 8 aa, Homo sapien
GFFLLGFL

SEQ ID NO: 1534 - protein, 9 aa, Homo sapien
GFFLLGFLF

SEQ ID NO: 1535 - protein, 11 aa, Homo sapien
GFFLLGFLFGW

SEQ ID NO: 1536 - protein, 8 aa, Homo sapien
GFGQLTQL

SEQ ID NO: 1537 - protein, 10 aa, Homo sapien
GFGQLTQLGM

SEQ ID NO: 1538 - protein, 8 aa, Homo sapien
GFLFGWFI

SEQ ID NO: 1539 - protein, 8 aa, Homo sapien
GFLFLLFF

SEQ ID NO: 1540 - protein, 9 aa, Homo sapien
GFLFLLFFW

SEQ ID NO: 1541 - protein, 10 aa, Homo sapien
GFLFLLFFWL

SEQ ID NO: 1542 - protein, 8 aa, Homo sapien
GIAEAVGL

SEQ ID NO: 1543 - protein, 11 aa, Homo sapien
GIAEAVGLPSI

SEQ ID NO: 1544 - protein, 9 aa, Homo sapien
GIASGRARY

SEQ ID NO: 1545 - protein, 11 aa, Homo sapien
GIHKQKEKSRL

SEQ ID NO: 1546 - protein, 10 aa, Homo sapien
GIWSKVYDPL

SEQ ID NO: 1547 - protein, 11 aa, Homo sapien
GIWSKVYDPLY

SEQ ID NO: 1548 - protein, 9 aa, Homo sapien
GIYDALFDI

SEQ ID NO: 1549 - protein, 10 aa, Homo sapien
GLDSVELAHY

SEQ ID NO: 1550 - protein, 8 aa, Homo sapien
GLHGQDLF

SEQ ID NO: 1551 - protein, 10 aa, Homo sapien
GLHGQDLFGI

SEQ ID NO: 1552 - protein, 11 aa, Homo sapien
GLHGQDLFGIW

SEQ ID NO: 1553 - protein, 8 aa, Homo sapien
GLLGSTEW

SEQ ID NO: 1554 - protein, 11 aa, Homo sapien
GLLPPYASCHL

SEQ ID NO: 1555 - protein, 8 aa, Homo sapien
GLPDRPFY

SEQ ID NO: 1556 - protein, 10 aa, Homo sapien
GLPSIPVHPI

SEQ ID NO: 1557 - protein, 9 aa, Homo sapien
GLPTQEPAL

SEQ ID NO: 1558 - protein, 9 aa, Homo sapien
GLQMALDVY

SEQ ID NO: 1559 - protein, 8 aa, Homo sapien
GMEQHYEL

SEQ ID NO: 1560 - protein, 11 aa, Homo sapien
GMEQHYELGEY

SEQ ID NO: 1561 - protein, 9 aa, Homo sapien
GMPEGDLVY

SEQ ID NO: 1562 - protein, 8 aa, Homo sapien
GMPRISKL

SEQ ID NO: 1563 - protein, 10 aa, Homo sapien
GMVFELANSI

SEQ ID NO: 1564 - protein, 8 aa, Homo sapien
GTEQNFQL

SEQ ID NO: 1565 - protein, 8 aa, Homo sapien
GTLKKEGW

SEQ ID NO: 1566 - protein, 9 aa, Homo sapien
GTTCYASGW

SEQ ID NO: 1567 - protein, 9 aa, Homo sapien
GTTCYASGW

SEQ ID NO: 1568 - protein, 11 aa, Homo sapien
GVAYINADSSI

SEQ ID NO: 1569 - protein, 11 aa, Homo sapien
GVILYSDPADY

SEQ ID NO: 1570 - protein, 9 aa, Homo sapien
GVKSYPDGW

SEQ ID NO: 1571 - protein, 11 aa, Homo sapien
GVKSYPDGWNL

SEQ ID NO: 1572 - protein, 9 aa, Homo sapien
GVLQGITSW

SEQ ID NO: 1573 - protein, 9 aa, Homo sapien
GVLQGITSW

SEQ ID NO: 1574 - protein, 8 aa, Homo sapien
GVLVHPQW

SEQ ID NO: 1575 - protein, 8 aa, Homo sapien
GVLVHPQW

SEQ ID NO: 1576 - protein, 10 aa, Homo sapien
GVLVHPQWVL

SEQ ID NO: 1577 - protein, 10 aa, Homo sapien
GVLVHPQWVL

SEQ ID NO: 1578 - protein, 8 aa, Homo sapien
GVLVNEIL

SEQ ID NO: 1579 - protein, 11 aa, Homo sapien
GVLVNEILNHM

SEQ ID NO: 1580 - protein, 8 aa, Homo sapien
GVQRGNIL

SEQ ID NO: 1581 - protein, 10 aa, Homo sapien
GVQRGNILNL

SEQ ID NO: 1582 - protein, 8 aa, Homo sapien
GVSIWNPI

SEQ ID NO: 1583 - protein, 9 aa, Homo sapien
GVSIWNPIL

SEQ ID NO: 1584 - protein, 10 aa, Homo sapien
GVSIWNPILL

SEQ ID NO: 1585 - protein, 11 aa, Homo sapien
GVSIWNPILLW

SEQ ID NO: 1586 - protein, 9 aa, Homo sapien
GWAHCGGVL

SEQ ID NO: 1587 - protein, 11 aa, Homo sapien
GWECEKHSQPW

SEQ ID NO: 1588 - protein, 11 aa, Homo sapien
GWECEKHSQPW

SEQ ID NO: 1589 - protein, 10 aa, Homo sapien
GWGSIEPEEF

SEQ ID NO: 1590 - protein, 10 aa, Homo sapien
GWGSIEPEEF

SEQ ID NO: 1591 - protein, 11 aa, Homo sapien
GWGSIEPEEFL

SEQ ID NO: 1592 - protein, 11 aa, Homo sapien
GWGSIEPEEFL

SEQ ID NO: 1593 - protein, 8 aa, Homo sapien
GWRPRRTI

SEQ ID NO: 1594 - protein, 9 aa, Homo sapien
GWRPRRTIL

SEQ ID NO: 1595 - protein, 10 aa, Homo sapien
GWRPRRTILF

SEQ ID NO: 1596 - protein, 8 aa, Homo sapien
GYENVSDI

SEQ ID NO: 1597 - protein, 9 aa, Homo sapien
GYPANEYAY

SEQ ID NO: 1598 - protein, 9 aa, Homo sapien
GYPLYHSVY

SEQ ID NO: 1599 - protein, 8 aa, Homo sapien
GYYDAQKL

SEQ ID NO: 1600 - protein, 9 aa, Homo sapien
GYYDAQKLL

SEQ ID NO: 1601 - protein, 11 aa, Homo sapien
HIHSTNEVTRI

SEQ ID NO: 1602 - protein, 9 aa, Homo sapien
HLAGTEQNF

SEQ ID NO: 1603 - protein, 11 aa, Homo sapien
HLAGTEQNFQL

SEQ ID NO: 1604 - protein, 11 aa, Homo sapien
HLTVAQVRGGM

SEQ ID NO: 1605 - protein, 8 aa, Homo sapien
HMKRATQI

SEQ ID NO: 1606 - protein, 11 aa, Homo sapien
HMKRATQIPSY

SEQ ID NO: 1607 - protein, 10 aa, Homo sapien
HTVPLSEDQL

SEQ ID NO: 1608 - protein, 11 aa, Homo sapien
HTVPLSEDQLL

SEQ ID NO: 1609 - protein, 8 aa, Homo sapien
HYDVLLSY

SEQ ID NO: 1610 - protein, 8 aa, Homo sapien
HYELGEYI

SEQ ID NO: 1611 - protein, 10 aa, Homo sapien
HYRKWIKDTI

SEQ ID NO: 1612 - protein, 10 aa, Homo sapien
HYRKWIKDTI

SEQ ID NO: 1613 - protein, 9 aa, Homo sapien
IINEDGNEI

SEQ ID NO: 1614 - protein, 10 aa, Homo sapien
IINEDGNEIF

SEQ ID NO: 1615 - protein, 11 aa, Homo sapien
ILFASWDAEEF

SEQ ID NO: 1616 - protein, 9 aa, Homo sapien
ILGGHRDSW

SEQ ID NO: 1617 - protein, 11 aa, Homo sapien
ILGGHRDSWVF

SEQ ID NO: 1618 - protein, 8 aa, Homo sapien
ILLGRHSL

SEQ ID NO: 1619 - protein, 9 aa, Homo sapien
ILLGRHSLF

SEQ ID NO: 1620 - protein, 11 aa, Homo sapien
ILNHMKRATQI

SEQ ID NO: 1621 - protein, 11 aa, Homo sapien
ILNLNGAGDPL

SEQ ID NO: 1622 - protein, 9 aa, Homo sapien
ILSRIVGGW

SEQ ID NO: 1623 - protein, 9 aa, Homo sapien
ILYSDPADY

SEQ ID NO: 1624 - protein, 10 aa, Homo sapien
ILYSDPADYF

SEQ ID NO: 1625 - protein, 8 aa, Homo sapien
ITDVVKVL

SEQ ID NO: 1626 - protein, 10 aa, Homo sapien
ITDVVKVLGL

SEQ ID NO: 1627 - protein, 10 aa, Homo sapien
ITPKHNMKAF

SEQ ID NO: 1628 - protein, 11 aa, Homo sapien
ITPKHNMKAFL

SEQ ID NO: 1629 - protein, 11 aa, Homo sapien
ITSWGPEPCAL

SEQ ID NO: 1630 - protein, 11 aa, Homo sapien
ITSWGSEPCAL

SEQ ID NO: 1631 - protein, 10 aa, Homo sapien
IVIARYGKVF

SEQ ID NO: 1632 - protein, 10 aa, Homo sapien
IVLPFDCRDY

SEQ ID NO: 1633 - protein, 10 aa, Homo sapien
IVLRMMNDQL

SEQ ID NO: 1634 - protein, 11 aa, Homo sapien
IVLRMMNDQLM

SEQ ID NO: 1635 - protein, 8 aa, Homo sapien
IVPPFSAF

SEQ ID NO: 1636 - protein, 8 aa, Homo sapien
IVRSFGTL

SEQ ID NO: 1637 - protein, 8 aa, Homo sapien
IWNPILLW

SEQ ID NO: 1638 - protein, 11 aa, Homo sapien
IWNPILLWQPI

SEQ ID NO: 1639 - protein, 9 aa, Homo sapien
IWSKVYDPL

SEQ ID NO: 1640 - protein, 10 aa, Homo sapien
IWSKVYDPLY

SEQ ID NO: 1641 - protein, 10 aa, Homo sapien
IYAPSSHNKY

SEQ ID NO: 1642 - protein, 8 aa, Homo sapien
IYDALFDI

SEQ ID NO: 1643 - protein, 8 aa, Homo sapien
IYNVIGTL

SEQ ID NO: 1644 - protein, 9 aa, Homo sapien
KFLYNFTQI

SEQ ID NO: 1645 - protein, 9 aa, Homo sapien
KFMLCAGRW

SEQ ID NO: 1646 - protein, 9 aa, Homo sapien
KFSERLQDF

SEQ ID NO: 1647 - protein, 8 aa, Homo sapien
KFSGYPLY

SEQ ID NO: 1648 - protein, 9 aa, Homo sapien
KFYDPMFKY

SEQ ID NO: 1649 - protein, 11 aa, Homo sapien
KFYDPMFKYHL

SEQ ID NO: 1650 - protein, 8 aa, Homo sapien
KINCSGKI

SEQ ID NO: 1651 - protein, 10 aa, Homo sapien
KINCSGKIVI

SEQ ID NO: 1652 - protein, 9 aa, Homo sapien
KITDVVKVL

SEQ ID NO: 1653 - protein, 11 aa, Homo sapien
KITDVVKVLGL

SEQ ID NO: 1654 - protein, 11 aa, Homo sapien
KIVIARYGKVF

SEQ ID NO: 1655 - protein, 8 aa, Homo sapien
KLERDMKI

SEQ ID NO: 1656 - protein, 8 aa, Homo sapien
KLGSGNDF

SEQ ID NO: 1657 - protein, 11 aa, Homo sapien
KLGSGNDFEVF

SEQ ID NO: 1658 - protein, 10 aa, Homo sapien
KLQCVDLHVI

SEQ ID NO: 1659 - protein, 8 aa, Homo sapien
KLRELSEL

SEQ ID NO: 1660 - protein, 10 aa, Homo sapien
KLRELSELSL

SEQ ID NO: 1661 - protein, 11 aa, Homo sapien
KLRELSELSLL

SEQ ID NO: 1662 - protein, 10 aa, Homo sapien
KLSGLHGQDL

SEQ ID NO: 1663 - protein, 11 aa, Homo sapien
KLSGLHGQDLF

SEQ ID NO: 1664 - protein, 9 aa, Homo sapien
KTHPNYISI

SEQ ID NO: 1665 - protein, 10 aa, Homo sapien
KTHPNYISII

SEQ ID NO: 1666 - protein, 10 aa, Homo sapien
KTYSVSFDSL

SEQ ID NO: 1667 - protein, 11 aa, Homo sapien
KTYSVSFDSLF

SEQ ID NO: 1668 - protein, 8 aa, Homo sapien
KVDPSKAW

SEQ ID NO: 1669 - protein, 10 aa, Homo sapien
KVPYNVGPGF

SEQ ID NO: 1670 - protein, 11 aa, Homo sapien
KVTEFMLCAGL

SEQ ID NO: 1671 - protein, 8 aa, Homo sapien
KVVHYRKW

SEQ ID NO: 1672 - protein, 8 aa, Homo sapien
KVVHYRKW

SEQ ID NO: 1673 - protein, 9 aa, Homo sapien
KVVHYRKWI

SEQ ID NO: 1674 - protein, 9 aa, Homo sapien
KVVHYRKWI

SEQ ID NO: 1675 - protein, 9 aa, Homo sapien
KYADKIYSI

SEQ ID NO: 1676 - protein, 11 aa, Homo sapien
KYADKIYSISM

SEQ ID NO: 1677 - protein, 10 aa, Homo sapien
KYAGESFPGI

SEQ ID NO: 1678 - protein, 11 aa, Homo sapien
KYAGESFPGIY

SEQ ID NO: 1679 - protein, 10 aa, Homo sapien
LFASWDAEEF

SEQ ID NO: 1680 - protein, 9 aa, Homo sapien
LFEPPPPGY

SEQ ID NO: 1681 - protein, 10 aa, Homo sapien
LFFWLDRSVL

SEQ ID NO: 1682 - protein, 9 aa, Homo sapien
LFGIWSKVY

SEQ ID NO: 1683 - protein, 11 aa, Homo sapien
LFHPEDTGQVF

SEQ ID NO: 1684 - protein, 8 aa, Homo sapien
LFLLFFWL

SEQ ID NO: 1685 - protein, 9 aa, Homo sapien
LFPPEGVSI

SEQ ID NO: 1686 - protein, 10 aa, Homo sapien
LFPPEGVSIW

SEQ ID NO: 1687 - protein, 8 aa, Homo sapien
LFSAVKNF

SEQ ID NO: 1688 - protein, 11 aa, Homo sapien
LFSAVKNFTEI

SEQ ID NO: 1689 - protein, 10 aa, Homo sapien
LILSRIVGGW

SEQ ID NO: 1690 - protein, 10 aa, Homo sapien
LIQSRIVGGW

SEQ ID NO: 1691 - protein, 8 aa, Homo sapien
LLARAASL

SEQ ID NO: 1692 - protein, 10 aa, Homo sapien
LLARAASLSL

SEQ ID NO: 1693 - protein, 11 aa, Homo sapien
LLFFWLDRSVL

SEQ ID NO: 1694 - protein, 8 aa, Homo sapien
LLGFLFGW

SEQ ID NO: 1695 - protein, 9 aa, Homo sapien
LLGFLFGWF

SEQ ID NO: 1696 - protein, 10 aa, Homo sapien
LLGFLFGWFI

SEQ ID NO: 1697 - protein, 8 aa, Homo sapien
LLGRHSLF

SEQ ID NO: 1698 - protein, 9 aa, Homo sapien
LLLARAASL

SEQ ID NO: 1699 - protein, 11 aa, Homo sapien
LLLARAASLSL

SEQ ID NO: 1700 - protein, 10 aa, Homo sapien
LLPPYASCHL

SEQ ID NO: 1701 - protein, 9 aa, Homo sapien
LLQERGVAY

SEQ ID NO: 1702 - protein, 10 aa, Homo sapien
LLQERGVAYI

SEQ ID NO: 1703 - protein, 10 aa, Homo sapien
LLRLSEPAEL

SEQ ID NO: 1704 - protein, 10 aa, Homo sapien
LLRLSEPAKI

SEQ ID NO: 1705 - protein, 11 aa, Homo sapien
LLSNDMCARAY

SEQ ID NO: 1706 - protein, 8 aa, Homo sapien
LMFLERAF

SEQ ID NO: 1707 - protein, 9 aa, Homo sapien
LMFLERAFI

SEQ ID NO: 1708 - protein, 8 aa, Homo sapien
LMSAMTNL

SEQ ID NO: 1709 - protein, 11 aa, Homo sapien
LMSAMTNLAAL

SEQ ID NO: 1710 - protein, 9 aa, Homo sapien
LMYSLVHNL

SEQ ID NO: 1711 - protein, 8 aa, Homo sapien
LTDAVKVM

SEQ ID NO: 1712 - protein, 10 aa, Homo sapien
LTDAVKVMDL

SEQ ID NO: 1713 - protein, 11 aa, Homo sapien
LTELYFEKGEY

SEQ ID NO: 1714 - protein, 8 aa, Homo sapien
LTLSVTWI

SEQ ID NO: 1715 - protein, 10 aa, Homo sapien
LTPGYPANEY

SEQ ID NO: 1716 - protein, 11 aa, Homo sapien
LTPKKLQCVDL

SEQ ID NO: 1717 - protein, 10 aa, Homo sapien
LTQLGMEQHY

SEQ ID NO: 1718 - protein, 10 aa, Homo sapien
LTVAQVRGGM

SEQ ID NO: 1719 - protein, 10 aa, Homo sapien
LVCNGVLQGI

SEQ ID NO: 1720 - protein, 10 aa, Homo sapien
LVCNGVLQGI

SEQ ID NO: 1721 - protein, 9 aa, Homo sapien
LVEKFYDPM

SEQ ID NO: 1722 - protein, 10 aa, Homo sapien
LVEKFYDPMF

SEQ ID NO: 1723 - protein, 11 aa, Homo sapien
LVFRHGDRSPI

SEQ ID NO: 1724 - protein, 10 aa, Homo sapien
LVGPVIPQDW

SEQ ID NO: 1725 - protein, 9 aa, Homo sapien
LVHNLTKEL

SEQ ID NO: 1726 - protein, 8 aa, Homo sapien
LVHPQWVL

SEQ ID NO: 1727 - protein, 8 aa, Homo sapien
LVHPQWVL

SEQ ID NO: 1728 - protein, 8 aa, Homo sapien
LVLAGGFF

SEQ ID NO: 1729 - protein, 9 aa, Homo sapien
LVLAGGFFL

SEQ ID NO: 1730 - protein, 10 aa, Homo sapien
LVLAGGFFLL

SEQ ID NO: 1731 - protein, 9 aa, Homo sapien
LVNEILNHM

SEQ ID NO: 1732 - protein, 9 aa, Homo sapien
LYCESVHNF

SEQ ID NO: 1733 - protein, 11 aa, Homo sapien
LYCESVHNFTL

SEQ ID NO: 1734 - protein, 11 aa, Homo sapien
LYDMSLLKNRF

SEQ ID NO: 1735 - protein, 8 aa, Homo sapien
LYFEKGEY

SEQ ID NO: 1736 - protein, 9 aa, Homo sapien
LYFEKGEYF

SEQ ID NO: 1737 - protein, 9 aa, Homo sapien
LYHSVYETY

SEQ ID NO: 1738 - protein, 11 aa, Homo sapien
LYHSVYETYEL

SEQ ID NO: 1739 - protein, 11 aa, Homo sapien
LYLPFRNCPRF

SEQ ID NO: 1740 - protein, 10 aa, Homo sapien
LYNFTQIPHL

SEQ ID NO: 1741 - protein, 8 aa, Homo sapien
LYSDPADY

SEQ ID NO: 1742 - protein, 9 aa, Homo sapien
LYSDPADYF

SEQ ID NO: 1743 - protein, 8 aa, Homo sapien
LYTKVVHY

SEQ ID NO: 1744 - protein, 11 aa, Homo sapien
LYTKVVHYRKW

SEQ ID NO: 1745 - protein, 8 aa, Homo sapien
MFLERAFI

SEQ ID NO: 1746 - protein, 11 aa, Homo sapien
MFLERAFIDPL

SEQ ID NO: 1747 - protein, 11 aa, Homo sapien
MLLRLSEPAEL

SEQ ID NO: 1748 - protein, 11 aa, Homo sapien
MLLRLSEPAKI

SEQ ID NO: 1749 - protein, 11 aa, Homo sapien
MLPGCSPSCPL

SEQ ID NO: 1750 - protein, 8 aa, Homo sapien
MMNDQLMF

SEQ ID NO: 1751 - protein, 9 aa, Homo sapien
MMNDQLMFL

SEQ ID NO: 1752 - protein, 10 aa, Homo sapien
MTKLRELSEL

SEQ ID NO: 1753 - protein, 8 aa, Homo sapien
MTNLAALF

SEQ ID NO: 1754 - protein, 9 aa, Homo sapien
MVFELANSI

SEQ ID NO: 1755 - protein, 11 aa, Homo sapien
MVFELANSIVL

SEQ ID NO: 1756 - protein, 8 aa, Homo sapien
MWDLVLSI

SEQ ID NO: 1757 - protein, 10 aa, Homo sapien
MWDLVLSIAL

SEQ ID NO: 1758 - protein, 8 aa, Homo sapien
MYSLVHNL

SEQ ID NO: 1759 - protein, 8 aa, Homo sapien
NFQLAKQI

SEQ ID NO: 1760 - protein, 9 aa, Homo sapien
NFSTQKVKM

SEQ ID NO: 1761 - protein, 11 aa, Homo sapien
NFSTQKVKMHI

SEQ ID NO: 1762 - protein, 9 aa, Homo sapien
NFTEIASKF

SEQ ID NO: 1763 - protein, 8 aa, Homo sapien
NFTQIPHL

SEQ ID NO: 1764 - protein, 9 aa, Homo sapien
NIKKFLYNF

SEQ ID NO: 1765 - protein, 8 aa, Homo sapien
NITPKHNM

SEQ ID NO: 1766 - protein, 11 aa, Homo sapien
NITPKHNMKAF

SEQ ID NO: 1767 - protein, 9 aa, Homo sapien
NLNGAGDPL

SEQ ID NO: 1768 - protein, 9 aa, Homo sapien
NMKAFLDEL

SEQ ID NO: 1769 - protein, 10 aa, Homo sapien
NMSLLKHQSL

SEQ ID NO: 1770 - protein, 10 aa, Homo sapien
NVGPGFTGNF

SEQ ID NO: 1771 - protein, 9 aa, Homo sapien
NVSDIVPPF

SEQ ID NO: 1772 - protein, 10 aa, Homo sapien
NWETNKFSGY

SEQ ID NO: 1773 - protein, 8 aa, Homo sapien
NYARTEDF

SEQ ID NO: 1774 - protein, 9 aa, Homo sapien
NYARTEDFF

SEQ ID NO: 1775 - protein, 11 aa, Homo sapien
NYARTEDFFKL

SEQ ID NO: 1776 - protein, 11 aa, Homo sapien
NYTLRVDCTPL

SEQ ID NO: 1777 - protein, 11 aa, Homo sapien
PFDCRDYAVVL

SEQ ID NO: 1778 - protein, 8 aa, Homo sapien
PFRNCPRF

SEQ ID NO: 1779 - protein, 11 aa, Homo sapien
PFRNCPRFQEL

SEQ ID NO: 1780 - protein, 10 aa, Homo sapien
PFSAFSPQGM

SEQ ID NO: 1781 - protein, 8 aa, Homo sapien
PFYRHVIY

SEQ ID NO: 1782 - protein, 10 aa, Homo sapien
PIDTFPTDPI

SEQ ID NO: 1783 - protein, 10 aa, Homo sapien
PIGYYDAQKL

SEQ ID NO: 1784 - protein, 11 aa, Homo sapien
PIGYYDAQKLL

SEQ ID NO: 1785 - protein, 11 aa, Homo sapien
PIKESSWPQGF

SEQ ID NO: 1786 - protein, 8 aa, Homo sapien
PILLWQPI

SEQ ID NO: 1787 - protein, 9 aa, Homo sapien
PIPVHTVPL

SEQ ID NO: 1788 - protein, 11 aa, Homo sapien
PIVLRMMNDQL

SEQ ID NO: 1789 - protein, 8 aa, Homo sapien
PLERFAEL

SEQ ID NO: 1790 - protein, 9 aa, Homo sapien
PLGLPDRPF

SEQ ID NO: 1791 - protein, 10 aa, Homo sapien
PLGLPDRPFY

SEQ ID NO: 1792 - protein, 11 aa, Homo sapien
PLILSRIVGGW

SEQ ID NO: 1793 - protein, 11 aa, Homo sapien
PLIQSRIVGGW

SEQ ID NO: 1794 - protein, 10 aa, Homo sapien
PLLLARAASL

SEQ ID NO: 1795 - protein, 10 aa, Homo sapien
PLMYSLVHNL

SEQ ID NO: 1796 - protein, 8 aa, Homo sapien
PLSEDQLL

SEQ ID NO: 1797 - protein, 9 aa, Homo sapien
PLSEDQLLY

SEQ ID NO: 1798 - protein, 10 aa, Homo sapien
PLSEDQLLYL

SEQ ID NO: 1799 - protein, 11 aa, Homo sapien
PLTPGYPANEY

SEQ ID NO: 1800 - protein, 8 aa, Homo sapien
PLVCNGVL

SEQ ID NO: 1801 - protein, 8 aa, Homo sapien
PLVCNGVL

SEQ ID NO: 1802 - protein, 11 aa, Homo sapien
PLVCNGVLQGI

SEQ ID NO: 1803 - protein, 11 aa, Homo sapien
PLVCNGVLQGI

SEQ ID NO: 1804 - protein, 10 aa, Homo sapien
PLYCESVHNF

SEQ ID NO: 1805 - protein, 8 aa, Homo sapien
PLYDMSLL

SEQ ID NO: 1806 - protein, 10 aa, Homo sapien
PLYHSVYETY

SEQ ID NO: 1807 - protein, 8 aa, Homo sapien
PLYNMSLL

SEQ ID NO: 1808 - protein, 10 aa, Homo sapien
PTDPIKESSW

SEQ ID NO: 1809 - protein, 8 aa, Homo sapien
PVHPIGYY

SEQ ID NO: 1810 - protein, 10 aa, Homo sapien
PVSHSFPHPL

SEQ ID NO: 1811 - protein, 11 aa, Homo sapien
PVSHSFPHPLY

SEQ ID NO: 1812 - protein, 11 aa, Homo sapien
PWQVAVYSHGW

SEQ ID NO: 1813 - protein, 10 aa, Homo sapien
PYASCHLTEL

SEQ ID NO: 1814 - protein, 11 aa, Homo sapien
PYASCHLTELY

SEQ ID NO: 1815 - protein, 9 aa, Homo sapien
PYKDFIATL

SEQ ID NO: 1816 - protein, 8 aa, Homo sapien
PYNVGPGF

SEQ ID NO: 1817 - protein, 8 aa, Homo sapien
QIPSYKKL

SEQ ID NO: 1818 - protein, 9 aa, Homo sapien
QIPSYKKLI

SEQ ID NO: 1819 - protein, 10 aa, Homo sapien
QIPSYKKLIM

SEQ ID NO: 1820 - protein, 11 aa, Homo sapien
QIPSYKKLIMY

SEQ ID NO: 1821 - protein, 9 aa, Homo sapien
QIQSQWKEF

SEQ ID NO: 1822 - protein, 11 aa, Homo sapien
QIQSQWKEFGL

SEQ ID NO: 1823 - protein, 9 aa, Homo sapien
QLAGAKGVI

SEQ ID NO: 1824 - protein, 10 aa, Homo sapien
QLAGAKGVIL

SEQ ID NO: 1825 - protein, 11 aa, Homo sapien
QLAGAKGVILY

SEQ ID NO: 1826 - protein, 10 aa, Homo sapien
QLAKQIQSQW

SEQ ID NO: 1827 - protein, 8 aa, Homo sapien
QLGMEQHY

SEQ ID NO: 1828 - protein, 10 aa, Homo sapien
QLGMEQHYEL

SEQ ID NO: 1829 - protein, 9 aa, Homo sapien
QLMFLERAF

SEQ ID NO: 1830 - protein, 10 aa, Homo sapien
QLMFLERAFI

SEQ ID NO: 1831 - protein, 11 aa, Homo sapien
QLTQLGMEQHY

SEQ ID NO: 1832 - protein, 10 aa, Homo sapien
QMALDVYNGL

SEQ ID NO: 1833 - protein, 11 aa, Homo sapien
QMALDVYNGLL

SEQ ID NO: 1834 - protein, 9 aa, Homo sapien
QVAVYSHGW

SEQ ID NO: 1835 - protein, 9 aa, Homo sapien
QVFQVSHSF

SEQ ID NO: 1836 - protein, 10 aa, Homo sapien
QVHPQKVTKF

SEQ ID NO: 1837 - protein, 11 aa, Homo sapien
QVHPQKVTKFM

SEQ ID NO: 1838 - protein, 8 aa, Homo sapien
QVRGGMVF

SEQ ID NO: 1839 - protein, 10 aa, Homo sapien
QVRGGMVFEL

SEQ ID NO: 1840 - protein, 10 aa, Homo sapien
QVSHSFPHPL

SEQ ID NO: 1841 - protein, 11 aa, Homo sapien
QVSHSFPHPLY

SEQ ID NO: 1842 - protein, 9 aa, Homo sapien
QVWLGRHNL

SEQ ID NO: 1843 - protein, 10 aa, Homo sapien
QVWLGRHNLF

SEQ ID NO: 1844 - protein, 10 aa, Homo sapien
QWVLTAAHCI

SEQ ID NO: 1845 - protein, 10 aa, Homo sapien
QWVLTAAHCL

SEQ ID NO: 1846 - protein, 10 aa, Homo sapien
RFAELVGPVI

SEQ ID NO: 1847 - protein, 10 aa, Homo sapien
RFQELESETL

SEQ ID NO: 1848 - protein, 11 aa, Homo sapien
RISKLGSGNDF

SEQ ID NO: 1849 - protein, 9 aa, Homo sapien
RIYNVIGTL

SEQ ID NO: 1850 - protein, 11 aa, Homo sapien
RLGIASGRARY

SEQ ID NO: 1851 - protein, 8 aa, Homo sapien
RLHPYKDF

SEQ ID NO: 1852 - protein, 9 aa, Homo sapien
RLHPYKDFI

SEQ ID NO: 1853 - protein, 10 aa, Homo sapien
RLLQERGVAY

SEQ ID NO: 1854 - protein, 11 aa, Homo sapien
RLLQERGVAYI

SEQ ID NO: 1855 - protein, 11 aa, Homo sapien
RLQDFDKSNPI

SEQ ID NO: 1856 - protein, 11 aa, Homo sapien
RLQGGVLVNEI

SEQ ID NO: 1857 - protein, 8 aa, Homo sapien
RLSEPAEL

SEQ ID NO: 1858 - protein, 8 aa, Homo sapien
RLSEPAKI

SEQ ID NO: 1859 - protein, 8 aa, Homo sapien
RMMNDQLM

SEQ ID NO: 1860 - protein, 9 aa, Homo sapien
RMMNDQLMF

SEQ ID NO: 1861 - protein, 10 aa, Homo sapien
RMMNDQLMFL

SEQ ID NO: 1862 - protein, 8 aa, Homo sapien
RTEDFFKL

SEQ ID NO: 1863 - protein, 8 aa, Homo sapien
RTILFASW

SEQ ID NO: 1864 - protein, 10 aa, Homo sapien
RTLMSAMTNL

SEQ ID NO: 1865 - protein, 8 aa, Homo sapien
RVDCTPLM

SEQ ID NO: 1866 - protein, 9 aa, Homo sapien
RVDCTPLMY

SEQ ID NO: 1867 - protein, 11 aa, Homo sapien
RVDCTPLMYSL

SEQ ID NO: 1868 - protein, 8 aa, Homo sapien
RVPVSHSF

SEQ ID NO: 1869 - protein, 8 aa, Homo sapien
RWLCAGAL

SEQ ID NO: 1870 - protein, 10 aa, Homo sapien
RWLCAGALVL

SEQ ID NO: 1871 - protein, 10 aa, Homo sapien
RYRKFLNESY

SEQ ID NO: 1872 - protein, 11 aa, Homo sapien
RYTKNWETNKF

SEQ ID NO: 1873 - protein, 10 aa, Homo sapien
SFGTLKKEGW

SEQ ID NO: 1874 - protein, 9 aa, Homo sapien
SFPGIYDAL

SEQ ID NO: 1875 - protein, 10 aa, Homo sapien
SFPGIYDALF

SEQ ID NO: 1876 - protein, 9 aa, Homo sapien
SFPHPLYDM

SEQ ID NO: 1877 - protein, 11 aa, Homo sapien
SFPHPLYDMSL

SEQ ID NO: 1878 - protein, 9 aa, Homo sapien
SFPHPLYNM

SEQ ID NO: 1879 - protein, 11 aa, Homo sapien
SFPHPLYNMSL

SEQ ID NO: 1880 - protein, 8 aa, Homo sapien
SIEGNYTL

SEQ ID NO: 1881 - protein, 8 aa, Homo sapien
SIEPEEFL

SEQ ID NO: 1882 - protein, 8 aa, Homo sapien
SIEPEEFL

SEQ ID NO: 1883 - protein, 10 aa, Homo sapien
SIINEDGNEI

SEQ ID NO: 1884 - protein, 11 aa, Homo sapien
SIINEDGNEIF

SEQ ID NO: 1885 - protein, 9 aa, Homo sapien
SIPVHPIGY

SEQ ID NO: 1886 - protein, 10 aa, Homo sapien
SIPVHPIGYY

SEQ ID NO: 1887 - protein, 10 aa, Homo sapien
SISMKHPQEM

SEQ ID NO: 1888 - protein, 11 aa, Homo sapien
SIVLPFDCRDY

SEQ ID NO: 1889 - protein, 8 aa, Homo sapien
SIWNPILL

SEQ ID NO: 1890 - protein, 9 aa, Homo sapien
SIWNPILLW

SEQ ID NO: 1891 - protein, 10 aa, Homo sapien
SLFEPPPPGY

SEQ ID NO: 1892 - protein, 9 aa, Homo sapien
SLFSAVKNF

SEQ ID NO: 1893 - protein, 8 aa, Homo sapien
SLGFLFLL

SEQ ID NO: 1894 - protein, 9 aa, Homo sapien
SLGFLFLLF

SEQ ID NO: 1895 - protein, 10 aa, Homo sapien
SLGFLFLLFF

SEQ ID NO: 1896 - protein, 11 aa, Homo sapien
SLGFLFLLFFW

SEQ ID NO: 1897 - protein, 9 aa, Homo sapien
SLHLLSNDM

SEQ ID NO: 1898 - protein, 8 aa, Homo sapien
SLLKHQSL

SEQ ID NO: 1899 - protein, 8 aa, Homo sapien
SLLKNRFL

SEQ ID NO: 1900 - protein, 8 aa, Homo sapien
SLLSLYGI

SEQ ID NO: 1901 - protein, 9 aa, Homo sapien
SLQCVSLHL

SEQ ID NO: 1902 - protein, 10 aa, Homo sapien
SLQCVSLHLL

SEQ ID NO: 1903 - protein, 8 aa, Homo sapien
SLSLGFLF

SEQ ID NO: 1904 - protein, 9 aa, Homo sapien
SLSLGFLFL

SEQ ID NO: 1905 - protein, 10 aa, Homo sapien
SLSLGFLFLL

SEQ ID NO: 1906 - protein, 11 aa, Homo sapien
SLSLGFLFLLF

SEQ ID NO: 1907 - protein, 10 aa, Homo sapien
SLVHNLTKEL

SEQ ID NO: 1908 - protein, 9 aa, Homo sapien
SLYTKVVHY

SEQ ID NO: 1909 - protein, 8 aa, Homo sapien
SMKHPQEM

SEQ ID NO: 1910 - protein, 11 aa, Homo sapien
SMKHPQEMKTY

SEQ ID NO: 1911 - protein, 11 aa, Homo sapien
STCSGDSGGPL

SEQ ID NO: 1912 - protein, 8 aa, Homo sapien
STDVDRTL

SEQ ID NO: 1913 - protein, 9 aa, Homo sapien
STDVDRTLM

SEQ ID NO: 1914 - protein, 11 aa, Homo sapien
STEWAEENSRL

SEQ ID NO: 1915 - protein, 8 aa, Homo sapien
STNEVTRI

SEQ ID NO: 1916 - protein, 9 aa, Homo sapien
STNEVTRIY

SEQ ID NO: 1917 - protein, 9 aa, Homo sapien
STQKVKMHI

SEQ ID NO: 1918 - protein, 10 aa, Homo sapien
SVELAHYDVL

SEQ ID NO: 1919 - protein, 11 aa, Homo sapien
SVELAHYDVLL

SEQ ID NO: 1920 - protein, 10 aa, Homo sapien
SVGCTGAVPL

SEQ ID NO: 1921 - protein, 11 aa, Homo sapien
SVGCTGAVPLI

SEQ ID NO: 1922 - protein, 10 aa, Homo sapien
SVHNFTLPSW

SEQ ID NO: 1923 - protein, 10 aa, Homo sapien
SVILLGRHSL

SEQ ID NO: 1924 - protein, 11 aa, Homo sapien
SVILLGRHSLF

SEQ ID NO: 1925 - protein, 9 aa, Homo sapien
SVLAKELKF

SEQ ID NO: 1926 - protein, 8 aa, Homo sapien
SVSFDSLF

SEQ ID NO: 1927 - protein, 10 aa, Homo sapien
SVTWIGAAPL

SEQ ID NO: 1928 - protein, 11 aa, Homo sapien
SVTWIGAAPLI

SEQ ID NO: 1929 - protein, 8 aa, Homo sapien
SVYETYEL

SEQ ID NO: 1930 - protein, 8 aa, Homo sapien
SWATEDTM

SEQ ID NO: 1931 - protein, 11 aa, Homo sapien
SWATEDTMTKL

SEQ ID NO: 1932 - protein, 9 aa, Homo sapien
SWDAEEFGL

SEQ ID NO: 1933 - protein, 10 aa, Homo sapien
SWDAEEFGLL

SEQ ID NO: 1934 - protein, 9 aa, Homo sapien
SWGPEPCAL

SEQ ID NO: 1935 - protein, 9 aa, Homo sapien
SWGSEPCAL

SEQ ID NO: 1936 - protein, 9 aa, Homo sapien
SWPQGFGQL

SEQ ID NO: 1937 - protein, 10 aa, Homo sapien
SWRGSLKVPY

SEQ ID NO: 1938 - protein, 11 aa, Homo sapien
SWTKKSPSPEF

SEQ ID NO: 1939 - protein, 8 aa, Homo sapien
SYKHEQVY

SEQ ID NO: 1940 - protein, 9 aa, Homo sapien
SYKHEQVYI

SEQ ID NO: 1941 - protein, 8 aa, Homo sapien
SYKKLIMY

SEQ ID NO: 1942 - protein, 8 aa, Homo sapien
SYPDGWNL

SEQ ID NO: 1943 - protein, 10 aa, Homo sapien
SYPNKTHPNY

SEQ ID NO: 1944 - protein, 11 aa, Homo sapien
SYPNKTHPNYI

SEQ ID NO: 1945 - protein, 8 aa, Homo sapien
TLGKLSGL

SEQ ID NO: 1946 - protein, 11 aa, Homo sapien
TLKSEEFQKRL

SEQ ID NO: 1947 - protein, 9 aa, Homo sapien
TLMSAMTNL

SEQ ID NO: 1948 - protein, 11 aa, Homo sapien
TLPSWATEDTM

SEQ ID NO: 1949 - protein, 11 aa, Homo sapien
TLRGAVEPDRY

SEQ ID NO: 1950 - protein, 9 aa, Homo sapien
TLRVDCTPL

SEQ ID NO: 1951 - protein, 10 aa, Homo sapien
TLRVDCTPLM

SEQ ID NO: 1952 - protein, 11 aa, Homo sapien
TLRVDCTPLMY

SEQ ID NO: 1953 - protein, 8 aa, Homo sapien
TMTKLREL

SEQ ID NO: 1954 - protein, 11 aa, Homo sapien
TMTKLRELSEL

SEQ ID NO: 1955 - protein, 8 aa, Homo sapien
TTCYASGW

SEQ ID NO: 1956 - protein, 8 aa, Homo sapien
TTCYASGW

SEQ ID NO: 1957 - protein, 11 aa, Homo sapien
TTCYASGWGSI

SEQ ID NO: 1958 - protein, 11 aa, Homo sapien
TTCYASGWGSI

SEQ ID NO: 1959 - protein, 8 aa, Homo sapien
TTVSGLQM

SEQ ID NO: 1960 - protein, 10 aa, Homo sapien
TTVSGLQMAL

SEQ ID NO: 1961 - protein, 9 aa, Homo sapien
TVAQVRGGM

SEQ ID NO: 1962 - protein, 11 aa, Homo sapien
TVAQVRGGMVF

SEQ ID NO: 1963 - protein, 9 aa, Homo sapien
TVPLSEDQL

SEQ ID NO: 1964 - protein, 10 aa, Homo sapien
TVPLSEDQLL

SEQ ID NO: 1965 - protein, 11 aa, Homo sapien
TVPLSEDQLLY

SEQ ID NO: 1966 - protein, 9 aa, Homo sapien
TVQAAAETL

SEQ ID NO: 1967 - protein, 9 aa, Homo sapien
TVSGLQMAL

SEQ ID NO: 1968 - protein, 8 aa, Homo sapien
TWIGAAPL

SEQ ID NO: 1969 - protein, 9 aa, Homo sapien
TWIGAAPLI

SEQ ID NO: 1970 - protein, 10 aa, Homo sapien
TWIGAAPLIL

SEQ ID NO: 1971 - protein, 8 aa, Homo sapien
TYELVEKF

SEQ ID NO: 1972 - protein, 9 aa, Homo sapien
TYELVEKFY

SEQ ID NO: 1973 - protein, 9 aa, Homo sapien
TYSVSFDSL

SEQ ID NO: 1974 - protein, 10 aa, Homo sapien
TYSVSFDSLF

SEQ ID NO: 1975 - protein, 8 aa, Homo sapien
VFELANSI

SEQ ID NO: 1976 - protein, 10 aa, Homo sapien
VFELANSIVL

SEQ ID NO: 1977 - protein, 8 aa, Homo sapien
VFFQRLGI

SEQ ID NO: 1978 - protein, 9 aa, Homo sapien
VFLTLSVTW

SEQ ID NO: 1979 - protein, 10 aa, Homo sapien
VFLTLSVTWI

SEQ ID NO: 1980 - protein, 8 aa, Homo sapien
VFQVSHSF

SEQ ID NO: 1981 - protein, 10 aa, Homo sapien
VFRHGDRSPI

SEQ ID NO: 1982 - protein, 9 aa, Homo sapien
VIARYGKVF

SEQ ID NO: 1983 - protein, 10 aa, Homo sapien
VILGGHRDSW

SEQ ID NO: 1984 - protein, 9 aa, Homo sapien
VILLGRHSL

SEQ ID NO: 1985 - protein, 10 aa, Homo sapien
VILLGRHSLF

SEQ ID NO: 1986 - protein, 10 aa, Homo sapien
VILYSDPADY

SEQ ID NO: 1987 - protein, 11 aa, Homo sapien
VILYSDPADYF

SEQ ID NO: 1988 - protein, 11 aa, Homo sapien
VIPQDWSTECM

SEQ ID NO: 1989 - protein, 11 aa, Homo sapien
VIYAPSSHNKY

SEQ ID NO: 1990 - protein, 8 aa, Homo sapien
VLAGGFFL

SEQ ID NO: 1991 - protein, 9 aa, Homo sapien
VLAGGFFLL

SEQ ID NO: 1992 - protein, 11 aa, Homo sapien
VLAGGFFLLGF

SEQ ID NO: 1993 - protein, 8 aa, Homo sapien
VLAKELKF

SEQ ID NO: 1994 - protein, 11 aa, Homo sapien
VLAKELKFVTL

SEQ ID NO: 1995 - protein, 11 aa, Homo sapien
VLGLPTQEPAL

SEQ ID NO: 1996 - protein, 9 aa, Homo sapien
VLPFDCRDY

SEQ ID NO: 1997 - protein, 8 aa, Homo sapien
VLQGITSW

SEQ ID NO: 1998 - protein, 8 aa, Homo sapien
VLQGITSW

SEQ ID NO: 1999 - protein, 9 aa, Homo sapien
VLRKYADKI

SEQ ID NO: 2000 - protein, 10 aa, Homo sapien
VLRKYADKIY

SEQ ID NO: 2001 - protein, 9 aa, Homo sapien
VLRMMNDQL

SEQ ID NO: 2002 - protein, 10 aa, Homo sapien
VLRMMNDQLM

SEQ ID NO: 2003 - protein, 11 aa, Homo sapien
VLRMMNDQLMF

SEQ ID NO: 2004 - protein, 8 aa, Homo sapien
VLTAAHCI

SEQ ID NO: 2005 - protein, 8 aa, Homo sapien
VLTAAHCL

SEQ ID NO: 2006 - protein, 9 aa, Homo sapien
VLVHPQWVL

SEQ ID NO: 2007 - protein, 9 aa, Homo sapien
VLVHPQWVL

SEQ ID NO: 2008 - protein, 10 aa, Homo sapien
VLVNEILNHM

SEQ ID NO: 2009 - protein, 11 aa, Homo sapien
VMDLPTQEPAL

SEQ ID NO: 2010 - protein, 10 aa, Homo sapien
VTEFMLCAGL

SEQ ID NO: 2011 - protein, 11 aa, Homo sapien
VTEFMLCAGLW

SEQ ID NO: 2012 - protein, 11 aa, Homo sapien
VTKFMLCAGRW

SEQ ID NO: 2013 - protein, 8 aa, Homo sapien
VTRIYNVI

SEQ ID NO: 2014 - protein, 11 aa, Homo sapien
VTRIYNVIGTL

SEQ ID NO: 2015 - protein, 9 aa, Homo sapien
VTWIGAAPL

SEQ ID NO: 2016 - protein, 10 aa, Homo sapien
VTWIGAAPLI

SEQ ID NO: 2017 - protein, 11 aa, Homo sapien
VTWIGAAPLIL

SEQ ID NO: 2018 - protein, 10 aa, Homo sapien
VVFLTLSVTW

SEQ ID NO: 2019 - protein, 11 aa, Homo sapien
VVFLTLSVTWI

SEQ ID NO: 2020 - protein, 9 aa, Homo sapien
VVHEIVRSF

SEQ ID NO: 2021 - protein, 8 aa, Homo sapien
VVHYRKWI

SEQ ID NO: 2022 - protein, 8 aa, Homo sapien
VVHYRKWI

SEQ ID NO: 2023 - protein, 10 aa, Homo sapien
VVLRKYADKI

SEQ ID NO: 2024 - protein, 11 aa, Homo sapien
VVLRKYADKIY

SEQ ID NO: 2025 - protein, 8 aa, Homo sapien
VWLGRHNL

SEQ ID NO: 2026 - protein, 9 aa, Homo sapien
VWLGRHNLF

SEQ ID NO: 2027 - protein, 11 aa, Homo sapien
VYETYELVEKF

SEQ ID NO: 2028 - protein, 9 aa, Homo sapien
VYNGLLPPY

SEQ ID NO: 2029 - protein, 8 aa, Homo sapien
VYTKVVHY

SEQ ID NO: 2030 - protein, 11 aa, Homo sapien
VYTKVVHYRKW

SEQ ID NO: 2031 - protein, 11 aa, Homo sapien
VYVNYARTEDF

SEQ ID NO: 2032 - protein, 8 aa, Homo sapien
WIGAAPLI

SEQ ID NO: 2033 - protein, 9 aa, Homo sapien
WIGAAPLIL

SEQ ID NO: 2034 - protein, 9 aa, Homo sapien
WLCAGALVL

SEQ ID NO: 2035 - protein, 11 aa, Homo sapien
WLDRSVLAKEL

SEQ ID NO: 2036 - protein, 8 aa, Homo sapien
WLGRHNLF

SEQ ID NO: 2037 - protein, 10 aa, Homo sapien
WTKKSPSPEF

SEQ ID NO: 2038 - protein, 9 aa, Homo sapien
WVLTAAHCI

SEQ ID NO: 2039 - protein, 9 aa, Homo sapien
WVLTAAHCL

SEQ ID NO: 2040 - protein, 9 aa, Homo sapien
YFAPGVKSY

SEQ ID NO: 2041 - protein, 8 aa, Homo sapien
YFEKGEYF

SEQ ID NO: 2042 - protein, 11 aa, Homo sapien
YFEKGEYFVEM

SEQ ID NO: 2043 - protein, 8 aa, Homo sapien
YINADSSI

SEQ ID NO: 2044 - protein, 9 aa, Homo sapien
YIRKRYRKF

SEQ ID NO: 2045 - protein, 10 aa, Homo sapien
YIRKRYRKFL

SEQ ID NO: 2046 - protein, 11 aa, Homo sapien
YIRSTDVDRTL

SEQ ID NO: 2047 - protein, 10 aa, Homo sapien
YLPFRNCPRF

SEQ ID NO: 2048 - protein, 10 aa, Homo sapien
YTKNWETNKF

SEQ ID NO: 2049 - protein, 10 aa, Homo sapien
YTKVVHYRKW

SEQ ID NO: 2050 - protein, 10 aa, Homo sapien
YTKVVHYRKW

SEQ ID NO: 2051 - protein, 11 aa, Homo sapien
YTKVVHYRKWI

SEQ ID NO: 2052 - protein, 11 aa, Homo sapien
YTKVVHYRKWI

SEQ ID NO: 2053 - protein, 10 aa, Homo sapien
YTLRVDCTPL

SEQ ID NO: 2054 - protein, 11 aa, Homo sapien
YTLRVDCTPLM

SEQ ID NO: 2055 - protein, 11 aa, Homo sapien
YVILGGHRDSW

SEQ ID NO: 2056 - protein, 10 aa, Homo sapien
YVNYARTEDF

SEQ ID NO: 2057 - protein, 11 aa, Homo sapien
YVNYARTEDFF

SEQ ID NO: 2058 - protein, 8 aa, Homo sapien
YYDAQKLL

SEQ ID NO: 2059 - protein, 11 aa, Homo sapien
YYDAQKLLEKM

SEQ ID NO: 2060 - protein, 11 aa, Homo sapien
YYRNETQHEPY

SEQ ID NO: 2061 - protein, 11 aa, Homo sapien
APGVKSYPDGW

SEQ ID NO: 2062 - protein, 8 aa, Homo sapien
APLILSRI

SEQ ID NO: 2063 - protein, 9 aa, Homo sapien
APLILSRIV

SEQ ID NO: 2064 - protein, 8 aa, Homo sapien
APLLLARA

SEQ ID NO: 2065 - protein, 9 aa, Homo sapien
APLLLARAA

SEQ ID NO: 2066 - protein, 11 aa, Homo sapien
APLLLARAASL

SEQ ID NO: 2067 - protein, 11 aa, Homo sapien
APPDSSWRGSL

SEQ ID NO: 2068 - protein, 8 aa, Homo sapien
APSSHNKY

SEQ ID NO: 2069 - protein, 9 aa, Homo sapien
APSSHNKYA

SEQ ID NO: 2070 - protein, 9 aa, Homo sapien
CPLERFAEL

SEQ ID NO: 2071 - protein, 10 aa, Homo sapien
CPLERFAELV

SEQ ID NO: 2072 - protein, 10 aa, Homo sapien
DPADYFAPGV

SEQ ID NO: 2073 - protein, 8 aa, Homo sapien
DPIKESSW

SEQ ID NO: 2074 - protein, 10 aa, Homo sapien
DPLGLPDRPF

SEQ ID NO: 2075 - protein, 11 aa, Homo sapien
DPLGLPDRPFY

SEQ ID NO: 2076 - protein, 9 aa, Homo sapien
DPLTPGYPA

SEQ ID NO: 2077 - protein, 8 aa, Homo sapien
DPLYCESV

SEQ ID NO: 2078 - protein, 11 aa, Homo sapien
DPLYCESVHNF

SEQ ID NO: 2079 - protein, 8 aa, Homo sapien
DPMFKYHL

SEQ ID NO: 2080 - protein, 10 aa, Homo sapien
DPMFKYHLTV

SEQ ID NO: 2081 - protein, 11 aa, Homo sapien
DPMFKYHLTVA

SEQ ID NO: 2082 - protein, 8 aa, Homo sapien
DPQSGAAV

SEQ ID NO: 2083 - protein, 9 aa, Homo sapien
DPQSGAAVV

SEQ ID NO: 2084 - protein, 9 aa, Homo sapien
DPSKAWGEV

SEQ ID NO: 2085 - protein, 8 aa, Homo sapien
EPAELTDA

SEQ ID NO: 2086 - protein, 9 aa, Homo sapien
EPAELTDAV

SEQ ID NO: 2087 - protein, 11 aa, Homo sapien
EPAELTDAVKV

SEQ ID NO: 2088 - protein, 8 aa, Homo sapien
EPAKITDV

SEQ ID NO: 2089 - protein, 9 aa, Homo sapien
EPAKITDVV

SEQ ID NO: 2090 - protein, 11 aa, Homo sapien
EPAKITDVVKV

SEQ ID NO: 2091 - protein, 9 aa, Homo sapien
EPALGTTCY

SEQ ID NO: 2092 - protein, 9 aa, Homo sapien
EPALGTTCY

SEQ ID NO: 2093 - protein, 10 aa, Homo sapien
EPALGTTCYA

SEQ ID NO: 2094 - protein, 10 aa, Homo sapien
EPALGTTCYA

SEQ ID NO: 2095 - protein, 10 aa, Homo sapien
EPCALPEKPA

SEQ ID NO: 2096 - protein, 11 aa, Homo sapien
EPCALPEKPAV

SEQ ID NO: 2097 - protein, 11 aa, Homo sapien
EPCALPERPSL

SEQ ID NO: 2098 - protein, 8 aa, Homo sapien
EPDRYVIL

SEQ ID NO: 2099 - protein, 9 aa, Homo sapien
EPEDTGQRV

SEQ ID NO: 2100 - protein, 11 aa, Homo sapien
EPEDTGQRVPV

SEQ ID NO: 2101 - protein, 11 aa, Homo sapien
EPEEFLRPRSL

SEQ ID NO: 2102 - protein, 11 aa, Homo sapien
EPEEFLTPKKL

SEQ ID NO: 2103 - protein, 10 aa, Homo sapien
EPPPPGYENV

SEQ ID NO: 2104 - protein, 8 aa, Homo sapien
FPGIYDAL

SEQ ID NO: 2105 - protein, 9 aa, Homo sapien
FPGIYDALF

SEQ ID NO: 2106 - protein, 11 aa, Homo sapien
FPGIYDALFDI

SEQ ID NO: 2107 - protein, 8 aa, Homo sapien
FPHPLYDM

SEQ ID NO: 2108 - protein, 10 aa, Homo sapien
FPHPLYDMSL

SEQ ID NO: 2109 - protein, 11 aa, Homo sapien
FPHPLYDMSLL

SEQ ID NO: 2110 - protein, 8 aa, Homo sapien
FPHPLYNM

SEQ ID NO: 2111 - protein, 10 aa, Homo sapien
FPHPLYNMSL

SEQ ID NO: 2112 - protein, 11 aa, Homo sapien
FPHPLYNMSLL

SEQ ID NO: 2113 - protein, 8 aa, Homo sapien
FPPEGVSI

SEQ ID NO: 2114 - protein, 9 aa, Homo sapien
FPPEGVSIW

SEQ ID NO: 2115 - protein, 11 aa, Homo sapien
FPTDPIKESSW

SEQ ID NO: 2116 - protein, 8 aa, Homo sapien
GPGFTGNF

SEQ ID NO: 2117 - protein, 8 aa, Homo sapien
GPLVCNGV

SEQ ID NO: 2118 - protein, 8 aa, Homo sapien
GPLVCNGV

SEQ ID NO: 2119 - protein, 9 aa, Homo sapien
GPLVCNGVL

SEQ ID NO: 2120 - protein, 9 aa, Homo sapien
GPLVCNGVL

SEQ ID NO: 2121 - protein, 8 aa, Homo sapien
GPVIPQDW

SEQ ID NO: 2122 - protein, 8 aa, Homo sapien
HPEDTGQV

SEQ ID NO: 2123 - protein, 9 aa, Homo sapien
HPEDTGQVF

SEQ ID NO: 2124 - protein, 11 aa, Homo sapien
HPEDTGQVFQV

SEQ ID NO: 2125 - protein, 8 aa, Homo sapien
HPIGYYDA

SEQ ID NO: 2126 - protein, 11 aa, Homo sapien
HPIGYYDAQKL

SEQ ID NO: 2127 - protein, 8 aa, Homo sapien
HPLYDMSL

SEQ ID NO: 2128 - protein, 9 aa, Homo sapien
HPLYDMSLL

SEQ ID NO: 2129 - protein, 8 aa, Homo sapien
HPLYNMSL

SEQ ID NO: 2130 - protein, 9 aa, Homo sapien
HPLYNMSLL

SEQ ID NO: 2131 - protein, 8 aa, Homo sapien
HPNYISII

SEQ ID NO: 2132 - protein, 8 aa, Homo sapien
HPQEMKTY

SEQ ID NO: 2133 - protein, 10 aa, Homo sapien
HPQEMKTYSV

SEQ ID NO: 2134 - protein, 8 aa, Homo sapien
HPQKVTKF

SEQ ID NO: 2135 - protein, 9 aa, Homo sapien
HPQKVTKFM

SEQ ID NO: 2136 - protein, 10 aa, Homo sapien
HPQKVTKFML

SEQ ID NO: 2137 - protein, 8 aa, Homo sapien
HPQWVLTA

SEQ ID NO: 2138 - protein, 8 aa, Homo sapien
HPQWVLTA

SEQ ID NO: 2139 - protein, 9 aa, Homo sapien
HPQWVLTAA

SEQ ID NO: 2140 - protein, 9 aa, Homo sapien
HPQWVLTAA

SEQ ID NO: 2141 - protein, 8 aa, Homo sapien
HPYKDFIA

SEQ ID NO: 2142 - protein, 10 aa, Homo sapien
HPYKDFIATL

SEQ ID NO: 2143 - protein, 11 aa, Homo sapien
IPHLAGTEQNF

SEQ ID NO: 2144 - protein, 10 aa, Homo sapien
IPQDWSTECM

SEQ ID NO: 2145 - protein, 8 aa, Homo sapien
IPSYKKLI

SEQ ID NO: 2146 - protein, 9 aa, Homo sapien
IPSYKKLIM

SEQ ID NO: 2147 - protein, 10 aa, Homo sapien
IPSYKKLIMY

SEQ ID NO: 2148 - protein, 8 aa, Homo sapien
IPVHPIGY

SEQ ID NO: 2149 - protein, 9 aa, Homo sapien
IPVHPIGYY

SEQ ID NO: 2150 - protein, 11 aa, Homo sapien
IPVHPIGYYDA

SEQ ID NO: 2151 - protein, 8 aa, Homo sapien
IPVHTVPL

SEQ ID NO: 2152 - protein, 8 aa, Homo sapien
KPAVYTKV

SEQ ID NO: 2153 - protein, 9 aa, Homo sapien
KPAVYTKVV

SEQ ID NO: 2154 - protein, 11 aa, Homo sapien
KPAVYTKVVHY

SEQ ID NO: 2155 - protein, 10 aa, Homo sapien
LPDRPFYRHV

SEQ ID NO: 2156 - protein, 11 aa, Homo sapien
LPDRPFYRHVI

SEQ ID NO: 2157 - protein, 8 aa, Homo sapien
LPEKPAVY

SEQ ID NO: 2158 - protein, 11 aa, Homo sapien
LPEKPAVYTKV

SEQ ID NO: 2159 - protein, 8 aa, Homo sapien
LPERPSLY

SEQ ID NO: 2160 - protein, 11 aa, Homo sapien
LPERPSLYTKV

SEQ ID NO: 2161 - protein, 8 aa, Homo sapien
LPFDCRDY

SEQ ID NO: 2162 - protein, 9 aa, Homo sapien
LPFDCRDYA

SEQ ID NO: 2163 - protein, 10 aa, Homo sapien
LPFDCRDYAV

SEQ ID NO: 2164 - protein, 11 aa, Homo sapien
LPFDCRDYAVV

SEQ ID NO: 2165 - protein, 9 aa, Homo sapien
LPFRNCPRF

SEQ ID NO: 2166 - protein, 10 aa, Homo sapien
LPGCSPSCPL

SEQ ID NO: 2167 - protein, 11 aa, Homo sapien
LPGGGVQRGNI

SEQ ID NO: 2168 - protein, 9 aa, Homo sapien
LPPYASCHL

SEQ ID NO: 2169 - protein, 9 aa, Homo sapien
LPSIPVHPI

SEQ ID NO: 2170 - protein, 11 aa, Homo sapien
LPSIPVHPIGY

SEQ ID NO: 2171 - protein, 10 aa, Homo sapien
LPSWATEDTM

SEQ ID NO: 2172 - protein, 8 aa, Homo sapien
LPTQEPAL

SEQ ID NO: 2173 - protein, 8 aa, Homo sapien
LPTQEPAL

SEQ ID NO: 2174 - protein, 8 aa, Homo sapien
MPEGDLVY

SEQ ID NO: 2175 - protein, 9 aa, Homo sapien
MPEGDLVYV

SEQ ID NO: 2176 - protein, 11 aa, Homo sapien
MPEGDLVYVNY

SEQ ID NO: 2177 - protein, 9 aa, Homo sapien
NPILLWQPI

SEQ ID NO: 2178 - protein, 11 aa, Homo sapien
NPILLWQPIPV

SEQ ID NO: 2179 - protein, 8 aa, Homo sapien
NPIVLRMM

SEQ ID NO: 2180 - protein, 10 aa, Homo sapien
PPDSSWRGSL

SEQ ID NO: 2181 - protein, 8 aa, Homo sapien
PPEGVSIW

SEQ ID NO: 2182 - protein, 11 aa, Homo sapien
PPEGVSIWNPI

SEQ ID NO: 2183 - protein, 11 aa, Homo sapien
PPFSAFSPQGM

SEQ ID NO: 2184 - protein, 10 aa, Homo sapien
PPGYENVSDI

SEQ ID NO: 2185 - protein, 11 aa, Homo sapien
PPGYENVSDIV

SEQ ID NO: 2186 - protein, 8 aa, Homo sapien
PPPGYENV

SEQ ID NO: 2187 - protein, 11 aa, Homo sapien
PPPGYENVSDI

SEQ ID NO: 2188 - protein, 9 aa, Homo sapien
PPPPGYENV

SEQ ID NO: 2189 - protein, 8 aa, Homo sapien
PPYASCHL

SEQ ID NO: 2190 - protein, 11 aa, Homo sapien
PPYASCHLTEL

SEQ ID NO: 2191 - protein, 8 aa, Homo sapien
QPIPVHTV

SEQ ID NO: 2192 - protein, 10 aa, Homo sapien
QPIPVHTVPL

SEQ ID NO: 2193 - protein, 8 aa, Homo sapien
QPWQVAVY

SEQ ID NO: 2194 - protein, 8 aa, Homo sapien
QPWQVLVA

SEQ ID NO: 2195 - protein, 10 aa, Homo sapien
RPDEDSSHDL

SEQ ID NO: 2196 - protein, 11 aa, Homo sapien
RPDEDSSHDLM

SEQ ID NO: 2197 - protein, 8 aa, Homo sapien
RPFYRHVI

SEQ ID NO: 2198 - protein, 9 aa, Homo sapien
RPFYRHVIY

SEQ ID NO: 2199 - protein, 10 aa, Homo sapien
RPFYRHVIYA

SEQ ID NO: 2200 - protein, 10 aa, Homo sapien
RPGDDSSHDL

SEQ ID NO: 2201 - protein, 11 aa, Homo sapien
RPGDDSSHDLM

SEQ ID NO: 2202 - protein, 8 aa, Homo sapien
RPRRTILF

SEQ ID NO: 2203 - protein, 9 aa, Homo sapien
RPRRTILFA

SEQ ID NO: 2204 - protein, 11 aa, Homo sapien
RPRRTILFASW

SEQ ID NO: 2205 - protein, 8 aa, Homo sapien
RPRSLQCV

SEQ ID NO: 2206 - protein, 10 aa, Homo sapien
RPRSLQCVSL

SEQ ID NO: 2207 - protein, 9 aa, Homo sapien
RPRWLCAGA

SEQ ID NO: 2208 - protein, 10 aa, Homo sapien
RPRWLCAGAL

SEQ ID NO: 2209 - protein, 11 aa, Homo sapien
RPRWLCAGALV

SEQ ID NO: 2210 - protein, 8 aa, Homo sapien
RPSLYTKV

SEQ ID NO: 2211 - protein, 9 aa, Homo sapien
RPSLYTKVV

SEQ ID NO: 2212 - protein, 11 aa, Homo sapien
RPSLYTKVVHY

SEQ ID NO: 2213 - protein, 11 aa, Homo sapien
SPDEGFEGKSL

SEQ ID NO: 2214 - protein, 10 aa, Homo sapien
SPEFSGMPRI

SEQ ID NO: 2215 - protein, 11 aa, Homo sapien
SPIDTFPTDPI

SEQ ID NO: 2216 - protein, 10 aa, Homo sapien
SPQGMPEGDL

SEQ ID NO: 2217 - protein, 11 aa, Homo sapien
SPQGMPEGDLV

SEQ ID NO: 2218 - protein, 9 aa, Homo sapien
SPSCPLERF

SEQ ID NO: 2219 - protein, 10 aa, Homo sapien
SPSCPLERFA

SEQ ID NO: 2220 - protein, 9 aa, Homo sapien
SPSPEFSGM

SEQ ID NO: 2221 - protein, 9 aa, Homo sapien
TPGYPANEY

SEQ ID NO: 2222 - protein, 10 aa, Homo sapien
TPGYPANEYA

SEQ ID NO: 2223 - protein, 11 aa, Homo sapien
TPGYPANEYAY

SEQ ID NO: 2224 - protein, 8 aa, Homo sapien
TPKHNMKA

SEQ ID NO: 2225 - protein, 9 aa, Homo sapien
TPKHNMKAF

SEQ ID NO: 2226 - protein, 10 aa, Homo sapien
TPKHNMKAFL

SEQ ID NO: 2227 - protein, 8 aa, Homo sapien
TPKKLQCV

SEQ ID NO: 2228 - protein, 10 aa, Homo sapien
TPKKLQCVDL

SEQ ID NO: 2229 - protein, 8 aa, Homo sapien
TPLMYSLV

SEQ ID NO: 2230 - protein, 11 aa, Homo sapien
TPLMYSLVHNL

SEQ ID NO: 2231 - protein, 8 aa, Homo sapien
VPLIQSRI

SEQ ID NO: 2232 - protein, 9 aa, Homo sapien
VPLIQSRIV

SEQ ID NO: 2233 - protein, 8 aa, Homo sapien
VPLSEDQL

SEQ ID NO: 2234 - protein, 9 aa, Homo sapien
VPLSEDQLL

SEQ ID NO: 2235 - protein, 10 aa, Homo sapien
VPLSEDQLLY

SEQ ID NO: 2236 - protein, 11 aa, Homo sapien
VPLSEDQLLYL

SEQ ID NO: 2237 - protein, 11 aa, Homo sapien
VPVSHSFPHPL

SEQ ID NO: 2238 - protein, 9 aa, Homo sapien
VPYNVGPGF

SEQ ID NO: 2239 - protein, 8 aa, Homo sapien
WPQGFGQL

SEQ ID NO: 2240 - protein, 11 aa, Homo sapien
WPQGFGQLTQL

SEQ ID NO: 2241 - protein, 8 aa, Homo sapien
YPANEYAY

SEQ ID NO: 2242 - protein, 8 aa, Homo sapien
YPLYHSVY

SEQ ID NO: 2243 - protein, 11 aa, Homo sapien
YPLYHSVYETY

SEQ ID NO: 2244 - protein, 9 aa, Homo sapien
YPNKTHPNY

SEQ ID NO: 2245 - protein, 10 aa, Homo sapien
YPNKTHPNYI

SEQ ID NO: 2246 - protein, 8 aa, Homo sapien
AHCGGVLV

SEQ ID NO: 2247 - protein, 9 aa, Homo sapien
AHCIRNKSV

SEQ ID NO: 2248 - protein, 10 aa, Homo sapien
AHCIRNKSVI

SEQ ID NO: 2249 - protein, 11 aa, Homo sapien
AHCIRNKSVIL

SEQ ID NO: 2250 - protein, 10 aa, Homo sapien
AHCLKKNSQV

SEQ ID NO: 2251 - protein, 11 aa, Homo sapien
AHCLKKNSQVW

SEQ ID NO: 2252 - protein, 9 aa, Homo sapien
AHDTTVSGL

SEQ ID NO: 2253 - protein, 11 aa, Homo sapien
AHDTTVSGLQM

SEQ ID NO: 2254 - protein, 9 aa, Homo sapien
AHYDVLLSY

SEQ ID NO: 2255 - protein, 9 aa, Homo sapien
AKELKFVTL

SEQ ID NO: 2256 - protein, 10 aa, Homo sapien
AKELKFVTLV

SEQ ID NO: 2257 - protein, 11 aa, Homo sapien
AKELKFVTLVF

SEQ ID NO: 2258 - protein, 11 aa, Homo sapien
AKGVILYSDPA

SEQ ID NO: 2259 - protein, 9 aa, Homo sapien
AKITDVVKV

SEQ ID NO: 2260 - protein, 10 aa, Homo sapien
AKITDVVKVL

SEQ ID NO: 2261 - protein, 8 aa, Homo sapien
AKQIQSQW

SEQ ID NO: 2262 - protein, 11 aa, Homo sapien
AKQIQSQWKEF

SEQ ID NO: 2263 - protein, 8 aa, Homo sapien
ARAASLSL

SEQ ID NO: 2264 - protein, 10 aa, Homo sapien
ARAASLSLGF

SEQ ID NO: 2265 - protein, 11 aa, Homo sapien
ARAASLSLGFL

SEQ ID NO: 2266 - protein, 8 aa, Homo sapien
ARAYSEKV

SEQ ID NO: 2267 - protein, 11 aa, Homo sapien
ARAYSEKVTEF

SEQ ID NO: 2268 - protein, 9 aa, Homo sapien
ARRPRWLCA

SEQ ID NO: 2269 - protein, 11 aa, Homo sapien
ARRPRWLCAGA

SEQ ID NO: 2270 - protein, 9 aa, Homo sapien
ARTEDFFKL

SEQ ID NO: 2271 - protein, 8 aa, Homo sapien
CHLTELYF

SEQ ID NO: 2272 - protein, 8 aa, Homo sapien
CRDYAVVL

SEQ ID NO: 2273 - protein, 11 aa, Homo sapien
CRDYAVVLRKY

SEQ ID NO: 2274 - protein, 8 aa, Homo sapien
DKIYSISM

SEQ ID NO: 2275 - protein, 8 aa, Homo sapien
DKSNPIVL

SEQ ID NO: 2276 - protein, 10 aa, Homo sapien
DKSNPIVLRM

SEQ ID NO: 2277 - protein, 11 aa, Homo sapien
DKSNPIVLRMM

SEQ ID NO: 2278 - protein, 8 aa, Homo sapien
DRPFYRHV

SEQ ID NO: 2279 - protein, 9 aa, Homo sapien
DRPFYRHVI

SEQ ID NO: 2280 - protein, 10 aa, Homo sapien
DRPFYRHVIY

SEQ ID NO: 2281 - protein, 11 aa, Homo sapien
DRPFYRHVIYA

SEQ ID NO: 2282 - protein, 8 aa, Homo sapien
DRSPIDTF

SEQ ID NO: 2283 - protein, 9 aa, Homo sapien
DRSVLAKEL

SEQ ID NO: 2284 - protein, 11 aa, Homo sapien
DRSVLAKELKF

SEQ ID NO: 2285 - protein, 8 aa, Homo sapien
DRTLMSAM

SEQ ID NO: 2286 - protein, 11 aa, Homo sapien
DRTLMSAMTNL

SEQ ID NO: 2287 - protein, 8 aa, Homo sapien
EKFYDPMF

SEQ ID NO: 2288 - protein, 10 aa, Homo sapien
EKFYDPMFKY

SEQ ID NO: 2289 - protein, 9 aa, Homo sapien
EKGEYFVEM

SEQ ID NO: 2290 - protein, 10 aa, Homo sapien
EKGEYFVEMY

SEQ ID NO: 2291 - protein, 11 aa, Homo sapien
EKGEYFVEMYY

SEQ ID NO: 2292 - protein, 9 aa, Homo sapien
EKHSQPWQV

SEQ ID NO: 2293 - protein, 9 aa, Homo sapien
EKHSQPWQV

SEQ ID NO: 2294 - protein, 10 aa, Homo sapien
EKHSQPWQVA

SEQ ID NO: 2295 - protein, 11 aa, Homo sapien
EKHSQPWQVAV

SEQ ID NO: 2296 - protein, 10 aa, Homo sapien
EKHSQPWQVL

SEQ ID NO: 2297 - protein, 11 aa, Homo sapien
EKHSQPWQVLV

SEQ ID NO: 2298 - protein, 9 aa, Homo sapien
EKPAVYTKV

SEQ ID NO: 2299 - protein, 10 aa, Homo sapien
EKPAVYTKVV

SEQ ID NO: 2300 - protein, 9 aa, Homo sapien
EKSRLQGGV

SEQ ID NO: 2301 - protein, 10 aa, Homo sapien
EKSRLQGGVL

SEQ ID NO: 2302 - protein, 11 aa, Homo sapien
EKSRLQGGVLV

SEQ ID NO: 2303 - protein, 8 aa, Homo sapien
EKVTEFML

SEQ ID NO: 2304 - protein, 10 aa, Homo sapien
EKVTEFMLCA

SEQ ID NO: 2305 - protein, 8 aa, Homo sapien
ERAFIDPL

SEQ ID NO: 2306 - protein, 10 aa, Homo sapien
ERAFIDPLGL

SEQ ID NO: 2307 - protein, 10 aa, Homo sapien
ERFAELVGPV

SEQ ID NO: 2308 - protein, 11 aa, Homo sapien
ERFAELVGPVI

SEQ ID NO: 2309 - protein, 9 aa, Homo sapien
ERGVAYINA

SEQ ID NO: 2310 - protein, 9 aa, Homo sapien
ERPSLYTKV

SEQ ID NO: 2311 - protein, 10 aa, Homo sapien
ERPSLYTKVV

SEQ ID NO: 2312 - protein, 9 aa, Homo sapien
FHPEDTGQV

SEQ ID NO: 2313 - protein, 10 aa, Homo sapien
FHPEDTGQVF

SEQ ID NO: 2314 - protein, 9 aa, Homo sapien
FKLERDMKI

SEQ ID NO: 2315 - protein, 8 aa, Homo sapien
FKYHLTVA

SEQ ID NO: 2316 - protein, 10 aa, Homo sapien
FKYHLTVAQV

SEQ ID NO: 2317 - protein, 9 aa, Homo sapien
FRGNKVKNA

SEQ ID NO: 2318 - protein, 11 aa, Homo sapien
FRGNKVKNAQL

SEQ ID NO: 2319 - protein, 9 aa, Homo sapien
FRHGDRSPI

SEQ ID NO: 2320 - protein, 10 aa, Homo sapien
FRNCPRFQEL

SEQ ID NO: 2321 - protein, 8 aa, Homo sapien
GHRDSWVF

SEQ ID NO: 2322 - protein, 11 aa, Homo sapien
GHRDSWVFGGI

SEQ ID NO: 2323 - protein, 8 aa, Homo sapien
GKIVIARY

SEQ ID NO: 2324 - protein, 11 aa, Homo sapien
GKIVIARYGKV

SEQ ID NO: 2325 - protein, 11 aa, Homo sapien
GKLSGLHGQDL

SEQ ID NO: 2326 - protein, 8 aa, Homo sapien
GKSLYESW

SEQ ID NO: 2327 - protein, 9 aa, Homo sapien
GKVFRGNKV

SEQ ID NO: 2328 - protein, 9 aa, Homo sapien
GRARYTKNW

SEQ ID NO: 2329 - protein, 8 aa, Homo sapien
GRAVCGGV

SEQ ID NO: 2330 - protein, 9 aa, Homo sapien
GRAVCGGVL

SEQ ID NO: 2331 - protein, 10 aa, Homo sapien
GRAVCGGVLV

SEQ ID NO: 2332 - protein, 9 aa, Homo sapien
HKQKEKSRL

SEQ ID NO: 2333 - protein, 10 aa, Homo sapien
HRDSWVFGGI

SEQ ID NO: 2334 - protein, 10 aa, Homo sapien
IHKQKEKSRL

SEQ ID NO: 2335 - protein, 10 aa, Homo sapien
IHSTNEVTRI

SEQ ID NO: 2336 - protein, 11 aa, Homo sapien
IHSTNEVTRIY

SEQ ID NO: 2337 - protein, 10 aa, Homo sapien
IKESSWPQGF

SEQ ID NO: 2338 - protein, 8 aa, Homo sapien
IKKFLYNF

SEQ ID NO: 2339 - protein, 11 aa, Homo sapien
IKKFLYNFTQI

SEQ ID NO: 2340 - protein, 10 aa, Homo sapien
IKSSNEATNI

SEQ ID NO: 2341 - protein, 8 aa, Homo sapien
IRKRYRKF

SEQ ID NO: 2342 - protein, 9 aa, Homo sapien
IRKRYRKFL

SEQ ID NO: 2343 - protein, 8 aa, Homo sapien
IRNKSVIL

SEQ ID NO: 2344 - protein, 9 aa, Homo sapien
IRNKSVILL

SEQ ID NO: 2345 - protein, 10 aa, Homo sapien
IRSTDVDRTL

SEQ ID NO: 2346 - protein, 11 aa, Homo sapien
IRSTDVDRTLM

SEQ ID NO: 2347 - protein, 8 aa, Homo sapien
KHNMKAFL

SEQ ID NO: 2348 - protein, 11 aa, Homo sapien
KHNMKAFLDEL

SEQ ID NO: 2349 - protein, 9 aa, Homo sapien
KHPQEMKTY

SEQ ID NO: 2350 - protein, 11 aa, Homo sapien
KHPQEMKTYSV

SEQ ID NO: 2351 - protein, 8 aa, Homo sapien
KHSQPWQV

SEQ ID NO: 2352 - protein, 8 aa, Homo sapien
KHSQPWQV

SEQ ID NO: 2353 - protein, 9 aa, Homo sapien
KHSQPWQVA

SEQ ID NO: 2354 - protein, 10 aa, Homo sapien
KHSQPWQVAV

SEQ ID NO: 2355 - protein, 11 aa, Homo sapien
KHSQPWQVAVY

SEQ ID NO: 2356 - protein, 9 aa, Homo sapien
KHSQPWQVL

SEQ ID NO: 2357 - protein, 10 aa, Homo sapien
KHSQPWQVLV

SEQ ID NO: 2358 - protein, 11 aa, Homo sapien
KHSQPWQVLVA

SEQ ID NO: 2359 - protein, 11 aa, Homo sapien
KKEGWRPRRTI

SEQ ID NO: 2360 - protein, 10 aa, Homo sapien
KKFLYNFTQI

SEQ ID NO: 2361 - protein, 8 aa, Homo sapien
KKLIMYSA

SEQ ID NO: 2362 - protein, 8 aa, Homo sapien
KKLQCVDL

SEQ ID NO: 2363 - protein, 10 aa, Homo sapien
KKLQCVDLHV

SEQ ID NO: 2364 - protein, 11 aa, Homo sapien
KKLQCVDLHVI

SEQ ID NO: 2365 - protein, 8 aa, Homo sapien
KKNSQVWL

SEQ ID NO: 2366 - protein, 8 aa, Homo sapien
KKSPSPEF

SEQ ID NO: 2367 - protein, 11 aa, Homo sapien
KKSPSPEFSGM

SEQ ID NO: 2368 - protein, 9 aa, Homo sapien
KRATQIPSY

SEQ ID NO: 2369 - protein, 9 aa, Homo sapien
KRLHPYKDF

SEQ ID NO: 2370 - protein, 10 aa, Homo sapien
KRLHPYKDFI

SEQ ID NO: 2371 - protein, 11 aa, Homo sapien
KRLHPYKDFIA

SEQ ID NO: 2372 - protein, 8 aa, Homo sapien
KRQIYVAA

SEQ ID NO: 2373 - protein, 9 aa, Homo sapien
KRQIYVAAF

SEQ ID NO: 2374 - protein, 11 aa, Homo sapien
KRQIYVAAFTV

SEQ ID NO: 2375 - protein, 11 aa, Homo sapien
KRYRKFLNESY

SEQ ID NO: 2376 - protein, 8 aa, Homo sapien
LHETDSAV

SEQ ID NO: 2377 - protein, 9 aa, Homo sapien
LHETDSAVA

SEQ ID NO: 2378 - protein, 11 aa, Homo sapien
LHETDSAVATA

SEQ ID NO: 2379 - protein, 9 aa, Homo sapien
LHGQDLFGI

SEQ ID NO: 2380 - protein, 10 aa, Homo sapien
LHGQDLFGIW

SEQ ID NO: 2381 - protein, 8 aa, Homo sapien
LHLLSNDM

SEQ ID NO: 2382 - protein, 10 aa, Homo sapien
LHLLSNDMCA

SEQ ID NO: 2383 - protein, 8 aa, Homo sapien
LHPYKDFI

SEQ ID NO: 2384 - protein, 9 aa, Homo sapien
LHPYKDFIA

SEQ ID NO: 2385 - protein, 11 aa, Homo sapien
LHPYKDFIATL

SEQ ID NO: 2386 - protein, 8 aa, Homo sapien
LHVISNDV

SEQ ID NO: 2387 - protein, 10 aa, Homo sapien
LHVISNDVCA

SEQ ID NO: 2388 - protein, 9 aa, Homo sapien
LKAENIKKF

SEQ ID NO: 2389 - protein, 10 aa, Homo sapien
LKAENIKKFL

SEQ ID NO: 2390 - protein, 11 aa, Homo sapien
LKAENIKKFLY

SEQ ID NO: 2391 - protein, 8 aa, Homo sapien
LKFVTLVF

SEQ ID NO: 2392 - protein, 8 aa, Homo sapien
LKKNSQVW

SEQ ID NO: 2393 - protein, 9 aa, Homo sapien
LKKNSQVWL

SEQ ID NO: 2394 - protein, 10 aa, Homo sapien
LKSEEFQKRL

SEQ ID NO: 2395 - protein, 8 aa, Homo sapien
LKSPDEGF

SEQ ID NO: 2396 - protein, 11 aa, Homo sapien
LKVPYNVGPGF

SEQ ID NO: 2397 - protein, 9 aa, Homo sapien
LRELSELSL

SEQ ID NO: 2398 - protein, 10 aa, Homo sapien
LRELSELSLL

SEQ ID NO: 2399 - protein, 10 aa, Homo sapien
LRGAVEPDRY

SEQ ID NO: 2400 - protein, 11 aa, Homo sapien
LRGAVEPDRYV

SEQ ID NO: 2401 - protein, 8 aa, Homo sapien
LRKYADKI

SEQ ID NO: 2402 - protein, 9 aa, Homo sapien
LRKYADKIY

SEQ ID NO: 2403 - protein, 11 aa, Homo sapien
LRKYADKIYSI

SEQ ID NO: 2404 - protein, 9 aa, Homo sapien
LRLSEPAEL

SEQ ID NO: 2405 - protein, 9 aa, Homo sapien
LRLSEPAKI

SEQ ID NO: 2406 - protein, 8 aa, Homo sapien
LRMMNDQL

SEQ ID NO: 2407 - protein, 9 aa, Homo sapien
LRMMNDQLM

SEQ ID NO: 2408 - protein, 10 aa, Homo sapien
LRMMNDQLMF

SEQ ID NO: 2409 - protein, 11 aa, Homo sapien
LRMMNDQLMFL

SEQ ID NO: 2410 - protein, 11 aa, Homo sapien
LRPDEDSSHDL

SEQ ID NO: 2411 - protein, 11 aa, Homo sapien
LRPGDDSSHDL

SEQ ID NO: 2412 - protein, 9 aa, Homo sapien
LRPRSLQCV

SEQ ID NO: 2413 - protein, 11 aa, Homo sapien
LRPRSLQCVSL

SEQ ID NO: 2414 - protein, 8 aa, Homo sapien
LRVDCTPL

SEQ ID NO: 2415 - protein, 9 aa, Homo sapien
LRVDCTPLM

SEQ ID NO: 2416 - protein, 10 aa, Homo sapien
LRVDCTPLMY

SEQ ID NO: 2417 - protein, 9 aa, Homo sapien
MHIHSTNEV

SEQ ID NO: 2418 - protein, 8 aa, Homo sapien
MKAFLDEL

SEQ ID NO: 2419 - protein, 10 aa, Homo sapien
MKAFLDELKA

SEQ ID NO: 2420 - protein, 10 aa, Homo sapien
MKHPQEMKTY

SEQ ID NO: 2421 - protein, 9 aa, Homo sapien
MKINCSGKI

SEQ ID NO: 2422 - protein, 10 aa, Homo sapien
MKINCSGKIV

SEQ ID NO: 2423 - protein, 11 aa, Homo sapien
MKINCSGKIVI

SEQ ID NO: 2424 - protein, 10 aa, Homo sapien
MKRATQIPSY

SEQ ID NO: 2425 - protein, 8 aa, Homo sapien
MKTYSVSF

SEQ ID NO: 2426 - protein, 11 aa, Homo sapien
MKTYSVSFDSL

SEQ ID NO: 2427 - protein, 8 aa, Homo sapien
MRAAPLLL

SEQ ID NO: 2428 - protein, 9 aa, Homo sapien
MRAAPLLLA

SEQ ID NO: 2429 - protein, 11 aa, Homo sapien
MRAAPLLLARA

SEQ ID NO: 2430 - protein, 9 aa, Homo sapien
NHMKRATQI

SEQ ID NO: 2431 - protein, 8 aa, Homo sapien
NKFSGYPL

SEQ ID NO: 2432 - protein, 9 aa, Homo sapien
NKFSGYPLY

SEQ ID NO: 2433 - protein, 8 aa, Homo sapien
NKTHPNYI

SEQ ID NO: 2434 - protein, 10 aa, Homo sapien
NKTHPNYISI

SEQ ID NO: 2435 - protein, 11 aa, Homo sapien
NKTHPNYISII

SEQ ID NO: 2436 - protein, 8 aa, Homo sapien
NKVKNAQL

SEQ ID NO: 2437 - protein, 9 aa, Homo sapien
NKVKNAQLA

SEQ ID NO: 2438 - protein, 11 aa, Homo sapien
NKVKNAQLAGA

SEQ ID NO: 2439 - protein, 8 aa, Homo sapien
NKYAGESF

SEQ ID NO: 2440 - protein, 11 aa, Homo sapien
NKYAGESFPGI

SEQ ID NO: 2441 - protein, 10 aa, Homo sapien
PHLAGTEQNF

SEQ ID NO: 2442 - protein, 9 aa, Homo sapien
PHPLYDMSL

SEQ ID NO: 2443 - protein, 10 aa, Homo sapien
PHPLYDMSLL

SEQ ID NO: 2444 - protein, 9 aa, Homo sapien
PHPLYNMSL

SEQ ID NO: 2445 - protein, 10 aa, Homo sapien
PHPLYNMSLL

SEQ ID NO: 2446 - protein, 8 aa, Homo sapien
PKHNMKAF

SEQ ID NO: 2447 - protein, 9 aa, Homo sapien
PKHNMKAFL

SEQ ID NO: 2448 - protein, 9 aa, Homo sapien
PKKLQCVDL

SEQ ID NO: 2449 - protein, 11 aa, Homo sapien
PKKLQCVDLHV

SEQ ID NO: 2450 - protein, 11 aa, Homo sapien
PRFQELESETL

SEQ ID NO: 2451 - protein, 8 aa, Homo sapien
PRRTILFA

SEQ ID NO: 2452 - protein, 10 aa, Homo sapien
PRRTILFASW

SEQ ID NO: 2453 - protein, 9 aa, Homo sapien
PRSLQCVSL

SEQ ID NO: 2454 - protein, 11 aa, Homo sapien
PRSLQCVSLHL

SEQ ID NO: 2455 - protein, 8 aa, Homo sapien
PRWLCAGA

SEQ ID NO: 2456 - protein, 9 aa, Homo sapien
PRWLCAGAL

SEQ ID NO: 2457 - protein, 10 aa, Homo sapien
PRWLCAGALV

SEQ ID NO: 2458 - protein, 11 aa, Homo sapien
PRWLCAGALVL

SEQ ID NO: 2459 - protein, 8 aa, Homo sapien
QHEPYPLM

SEQ ID NO: 2460 - protein, 9 aa, Homo sapien
QHEPYPLML

SEQ ID NO: 2461 - protein, 8 aa, Homo sapien
QHYELGEY

SEQ ID NO: 2462 - protein, 9 aa, Homo sapien
QHYELGEYI

SEQ ID NO: 2463 - protein, 11 aa, Homo sapien
QKEKSRLQGGV

SEQ ID NO: 2464 - protein, 11 aa, Homo sapien
QKLLEKMGGSA

SEQ ID NO: 2465 - protein, 10 aa, Homo sapien
QKRLHPYKDF

SEQ ID NO: 2466 - protein, 11 aa, Homo sapien
QKRLHPYKDFI

SEQ ID NO: 2467 - protein, 8 aa, Homo sapien
QKVTKFML

SEQ ID NO: 2468 - protein, 10 aa, Homo sapien
QKVTKFMLCA

SEQ ID NO: 2469 - protein, 8 aa, Homo sapien
QRGNILNL

SEQ ID NO: 2470 - protein, 11 aa, Homo sapien
QRGNILNLNGA

SEQ ID NO: 2471 - protein, 10 aa, Homo sapien
QRLGIASGRA

SEQ ID NO: 2472 - protein, 9 aa, Homo sapien
QRVPVSHSF

SEQ ID NO: 2473 - protein, 8 aa, Homo sapien
RHGDRSPI

SEQ ID NO: 2474 - protein, 11 aa, Homo sapien
RHGDRSPIDTF

SEQ ID NO: 2475 - protein, 8 aa, Homo sapien
RKFLNESY

SEQ ID NO: 2476 - protein, 8 aa, Homo sapien
RKRYRKFL

SEQ ID NO: 2477 - protein, 8 aa, Homo sapien
RKWIKDTI

SEQ ID NO: 2478 - protein, 8 aa, Homo sapien
RKWIKDTI

SEQ ID NO: 2479 - protein, 9 aa, Homo sapien
RKWIKDTIA

SEQ ID NO: 2480 - protein, 10 aa, Homo sapien
RKWIKDTIAA

SEQ ID NO: 2481 - protein, 9 aa, Homo sapien
RKWIKDTIV

SEQ ID NO: 2482 - protein, 10 aa, Homo sapien
RKWIKDTIVA

SEQ ID NO: 2483 - protein, 8 aa, Homo sapien
RKYADKIY

SEQ ID NO: 2484 - protein, 10 aa, Homo sapien
RKYADKIYSI

SEQ ID NO: 2485 - protein, 8 aa, Homo sapien
RRGIAEAV

SEQ ID NO: 2486 - protein, 10 aa, Homo sapien
RRGIAEAVGL

SEQ ID NO: 2487 - protein, 8 aa, Homo sapien
RRPRWLCA

SEQ ID NO: 2488 - protein, 10 aa, Homo sapien
RRPRWLCAGA

SEQ ID NO: 2489 - protein, 11 aa, Homo sapien
RRPRWLCAGAL

SEQ ID NO: 2490 - protein, 9 aa, Homo sapien
RRTILFASW

SEQ ID NO: 2491 - protein, 11 aa, Homo sapien
RRTILFASWDA

SEQ ID NO: 2492 - protein, 9 aa, Homo sapien
SHDLMLLRL

SEQ ID NO: 2493 - protein, 9 aa, Homo sapien
SHDLMLLRL

SEQ ID NO: 2494 - protein, 10 aa, Homo sapien
SHGWAHCGGV

SEQ ID NO: 2495 - protein, 11 aa, Homo sapien
SHGWAHCGGVL

SEQ ID NO: 2496 - protein, 10 aa, Homo sapien
SHNKYAGESF

SEQ ID NO: 2497 - protein, 8 aa, Homo sapien
SHSFPHPL

SEQ ID NO: 2498 - protein, 8 aa, Homo sapien
SHSFPHPL

SEQ ID NO: 2499 - protein, 9 aa, Homo sapien
SHSFPHPLY

SEQ ID NO: 2500 - protein, 9 aa, Homo sapien
SHSFPHPLY

SEQ ID NO: 2501 - protein, 11 aa, Homo sapien
SHSFPHPLYDM

SEQ ID NO: 2502 - protein, 11 aa, Homo sapien
SHSFPHPLYNM

SEQ ID NO: 2503 - protein, 11 aa, Homo sapien
SKAWGEVKRQI

SEQ ID NO: 2504 - protein, 10 aa, Homo sapien
SKFSERLQDF

SEQ ID NO: 2505 - protein, 9 aa, Homo sapien
SKLGSGNDF

SEQ ID NO: 2506 - protein, 11 aa, Homo sapien
SKLGSGNDFEV

SEQ ID NO: 2507 - protein, 8 aa, Homo sapien
SKVDPSKA

SEQ ID NO: 2508 - protein, 9 aa, Homo sapien
SKVDPSKAW

SEQ ID NO: 2509 - protein, 8 aa, Homo sapien
SKVYDPLY

SEQ ID NO: 2510 - protein, 10 aa, Homo sapien
SRGRAVCGGV

SEQ ID NO: 2511 - protein, 11 aa, Homo sapien
SRGRAVCGGVL

SEQ ID NO: 2512 - protein, 9 aa, Homo sapien
SRLLQERGV

SEQ ID NO: 2513 - protein, 10 aa, Homo sapien
SRLLQERGVA

SEQ ID NO: 2514 - protein, 11 aa, Homo sapien
SRLLQERGVAY

SEQ ID NO: 2515 - protein, 8 aa, Homo sapien
SRLQGGVL

SEQ ID NO: 2516 - protein, 9 aa, Homo sapien
SRLQGGVLV

SEQ ID NO: 2517 - protein, 8 aa, Homo sapien
THPNYISI

SEQ ID NO: 2518 - protein, 9 aa, Homo sapien
THPNYISII

SEQ ID NO: 2519 - protein, 11 aa, Homo sapien
TKELKSPDEGF

SEQ ID NO: 2520 - protein, 10 aa, Homo sapien
TKFMLCAGRW

SEQ ID NO: 2521 - protein, 9 aa, Homo sapien
TKKSPSPEF

SEQ ID NO: 2522 - protein, 9 aa, Homo sapien
TKLRELSEL

SEQ ID NO: 2523 - protein, 11 aa, Homo sapien
TKLRELSELSL

SEQ ID NO: 2524 - protein, 9 aa, Homo sapien
TKNWETNKF

SEQ ID NO: 2525 - protein, 9 aa, Homo sapien
TKVVHYRKW

SEQ ID NO: 2526 - protein, 9 aa, Homo sapien
TKVVHYRKW

SEQ ID NO: 2527 - protein, 10 aa, Homo sapien
TKVVHYRKWI

SEQ ID NO: 2528 - protein, 10 aa, Homo sapien
TKVVHYRKWI

SEQ ID NO: 2529 - protein, 10 aa, Homo sapien
TRIYNVIGTL

SEQ ID NO: 2530 - protein, 8 aa, Homo sapien
VHEIVRSF

SEQ ID NO: 2531 - protein, 11 aa, Homo sapien
VHEIVRSFGTL

SEQ ID NO: 2532 - protein, 9 aa, Homo sapien
VHNFTLPSW

SEQ ID NO: 2533 - protein, 10 aa, Homo sapien
VHNFTLPSWA

SEQ ID NO: 2534 - protein, 8 aa, Homo sapien
VHNLTKEL

SEQ ID NO: 2535 - protein, 9 aa, Homo sapien
VHPIGYYDA

SEQ ID NO: 2536 - protein, 9 aa, Homo sapien
VHPQKVTKF

SEQ ID NO: 2537 - protein, 10 aa, Homo sapien
VHPQKVTKFM

SEQ ID NO: 2538 - protein, 11 aa, Homo sapien
VHPQKVTKFML

SEQ ID NO: 2539 - protein, 9 aa, Homo sapien
VHPQWVLTA

SEQ ID NO: 2540 - protein, 9 aa, Homo sapien
VHPQWVLTA

SEQ ID NO: 2541 - protein, 10 aa, Homo sapien
VHPQWVLTAA

SEQ ID NO: 2542 - protein, 10 aa, Homo sapien
VHPQWVLTAA

SEQ ID NO: 2543 - protein, 11 aa, Homo sapien
VHTVPLSEDQL

SEQ ID NO: 2544 - protein, 11 aa, Homo sapien
VHYRKWIKDTI

SEQ ID NO: 2545 - protein, 11 aa, Homo sapien
VHYRKWIKDTI

SEQ ID NO: 2546 - protein, 11 aa, Homo sapien
VKMHIHSTNEV

SEQ ID NO: 2547 - protein, 9 aa, Homo sapien
VKNAQLAGA

SEQ ID NO: 2548 - protein, 8 aa, Homo sapien
VKNFTEIA

SEQ ID NO: 2549 - protein, 11 aa, Homo sapien
VKNFTEIASKF

SEQ ID NO: 2550 - protein, 8 aa, Homo sapien
VKRQIYVA

SEQ ID NO: 2551 - protein, 9 aa, Homo sapien
VKRQIYVAA

SEQ ID NO: 2552 - protein, 10 aa, Homo sapien
VKRQIYVAAF

SEQ ID NO: 2553 - protein, 8 aa, Homo sapien
VKSYPDGW

SEQ ID NO: 2554 - protein, 10 aa, Homo sapien
VKSYPDGWNL

SEQ ID NO: 2555 - protein, 9 aa, Homo sapien
VRGGMVFEL

SEQ ID NO: 2556 - protein, 10 aa, Homo sapien
VRGGMVFELA

SEQ ID NO: 2557 - protein, 9 aa, Homo sapien
WKEFGLDSV

SEQ ID NO: 2558 - protein, 11 aa, Homo sapien
WKEFGLDSVEL

SEQ ID NO: 2559 - protein, 9 aa, Homo sapien
WRGSLKVPY

SEQ ID NO: 2560 - protein, 11 aa, Homo sapien
WRGSLKVPYNV

SEQ ID NO: 2561 - protein, 8 aa, Homo sapien
WRPRRTIL

SEQ ID NO: 2562 - protein, 9 aa, Homo sapien
WRPRRTILF

SEQ ID NO: 2563 - protein, 10 aa, Homo sapien
WRPRRTILFA

SEQ ID NO: 2564 - protein, 8 aa, Homo sapien
YHLTVAQV

SEQ ID NO: 2565 - protein, 8 aa, Homo sapien
YHSVYETY

SEQ ID NO: 2566 - protein, 10 aa, Homo sapien
YHSVYETYEL

SEQ ID NO: 2567 - protein, 11 aa, Homo sapien
YHSVYETYELV

SEQ ID NO: 2568 - protein, 8 aa, Homo sapien
YKDFIATL

SEQ ID NO: 2569 - protein, 11 aa, Homo sapien
YKDFIATLGKL

SEQ ID NO: 2570 - protein, 8 aa, Homo sapien
YKHEQVYI

SEQ ID NO: 2571 - protein, 9 aa, Homo sapien
YKKLIMYSA

SEQ ID NO: 2572 - protein, 9 aa, Homo sapien
YRKFLNESY

SEQ ID NO: 2573 - protein, 9 aa, Homo sapien
YRKWIKDTI

SEQ ID NO: 2574 - protein, 9 aa, Homo sapien
YRKWIKDTI

SEQ ID NO: 2575 - protein, 10 aa, Homo sapien
YRKWIKDTIA

SEQ ID NO: 2576 - protein, 11 aa, Homo sapien
YRKWIKDTIAA

SEQ ID NO: 2577 - protein, 10 aa, Homo sapien
YRKWIKDTIV

SEQ ID NO: 2578 - protein, 11 aa, Homo sapien
YRKWIKDTIVA

SEQ ID NO: 2579 - protein, 10 aa, Homo sapien
YRNETQHEPY

SEQ ID NO: 2580 - protein, 8 aa, Homo sapien
YRRGIAEA

SEQ ID NO: 2581 - protein, 9 aa, Homo sapien
YRRGIAEAV

SEQ ID NO: 2582 - protein, 11 aa, Homo sapien
YRRGIAEAVGL

SEQ ID NO: 2583 - protein, 9 aa, Homo sapien
AAAETLSEV

SEQ ID NO: 2584 - protein, 10 aa, Homo sapien
AAAETLSEVA

SEQ ID NO: 2585 - protein, 8 aa, Homo sapien
AAETLSEV

SEQ ID NO: 2586 - protein, 9 aa, Homo sapien
AAETLSEVA

SEQ ID NO: 2587 - protein, 8 aa, Homo sapien
AAFTVQAA

SEQ ID NO: 2588 - protein, 9 aa, Homo sapien
AAFTVQAAA

SEQ ID NO: 2589 - protein, 10 aa, Homo sapien
AAHCIRNKSV

SEQ ID NO: 2590 - protein, 11 aa, Homo sapien
AAHCIRNKSVI

SEQ ID NO: 2591 - protein, 11 aa, Homo sapien
AAHCLKKNSQV

SEQ ID NO: 2592 - protein, 9 aa, Homo sapien
AALFPPEGV

SEQ ID NO: 2593 - protein, 11 aa, Homo sapien
AALFPPEGVSI

SEQ ID NO: 2594 - protein, 9 aa, Homo sapien
AAPLILSRI

SEQ ID NO: 2595 - protein, 10 aa, Homo sapien
AAPLILSRIV

SEQ ID NO: 2596 - protein, 9 aa, Homo sapien
AAPLLLARA

SEQ ID NO: 2597 - protein, 10 aa, Homo sapien
AAPLLLARAA

SEQ ID NO: 2598 - protein, 8 aa, Homo sapien
AASLSLGF

SEQ ID NO: 2599 - protein, 9 aa, Homo sapien
AASLSLGFL

SEQ ID NO: 2600 - protein, 10 aa, Homo sapien
AASLSLGFLF

SEQ ID NO: 2601 - protein, 11 aa, Homo sapien
AASLSLGFLFL

SEQ ID NO: 2602 - protein, 8 aa, Homo sapien
AAVVHEIV

SEQ ID NO: 2603 - protein, 11 aa, Homo sapien
AAVVHEIVRSF

SEQ ID NO: 2604 - protein, 8 aa, Homo sapien
ASCHLTEL

SEQ ID NO: 2605 - protein, 9 aa, Homo sapien
ASCHLTELY

SEQ ID NO: 2606 - protein, 10 aa, Homo sapien
ASCHLTELYF

SEQ ID NO: 2607 - protein, 11 aa, Homo sapien
ASGRARYTKNW

SEQ ID NO: 2608 - protein, 8 aa, Homo sapien
ASKFSERL

SEQ ID NO: 2609 - protein, 11 aa, Homo sapien
ASKFSERLQDF

SEQ ID NO: 2610 - protein, 8 aa, Homo sapien
ASLSLGFL

SEQ ID NO: 2611 - protein, 9 aa, Homo sapien
ASLSLGFLF

SEQ ID NO: 2612 - protein, 10 aa, Homo sapien
ASLSLGFLFL

SEQ ID NO: 2613 - protein, 11 aa, Homo sapien
ASLSLGFLFLL

SEQ ID NO: 2614 - protein, 11 aa, Homo sapien
ASRGRAVCGGV

SEQ ID NO: 2615 - protein, 8 aa, Homo sapien
ASWDAEEF

SEQ ID NO: 2616 - protein, 10 aa, Homo sapien
ASWDAEEFGL

SEQ ID NO: 2617 - protein, 11 aa, Homo sapien
ASWDAEEFGLL

SEQ ID NO: 2618 - protein, 8 aa, Homo sapien
ATARRPRW

SEQ ID NO: 2619 - protein, 9 aa, Homo sapien
ATARRPRWL

SEQ ID NO: 2620 - protein, 11 aa, Homo sapien
ATARRPRWLCA

SEQ ID NO: 2621 - protein, 9 aa, Homo sapien
ATEDTMTKL

SEQ ID NO: 2622 - protein, 9 aa, Homo sapien
ATLGKLSGL

SEQ ID NO: 2623 - protein, 10 aa, Homo sapien
ATNITPKHNM

SEQ ID NO: 2624 - protein, 10 aa, Homo sapien
ATQIPSYKKL

SEQ ID NO: 2625 - protein, 11 aa, Homo sapien
ATQIPSYKKLI

SEQ ID NO: 2626 - protein, 8 aa, Homo sapien
CAGALVLA

SEQ ID NO: 2627 - protein, 11 aa, Homo sapien
CAGALVLAGGF

SEQ ID NO: 2628 - protein, 8 aa, Homo sapien
CALPEKPA

SEQ ID NO: 2629 - protein, 9 aa, Homo sapien
CALPEKPAV

SEQ ID NO: 2630 - protein, 10 aa, Homo sapien
CALPEKPAVY

SEQ ID NO: 2631 - protein, 9 aa, Homo sapien
CALPERPSL

SEQ ID NO: 2632 - protein, 10 aa, Homo sapien
CALPERPSLY

SEQ ID NO: 2633 - protein, 9 aa, Homo sapien
CAQVHPQKV

SEQ ID NO: 2634 - protein, 9 aa, Homo sapien
CARAYSEKV

SEQ ID NO: 2635 - protein, 9 aa, Homo sapien
CSGDSGGPL

SEQ ID NO: 2636 - protein, 10 aa, Homo sapien
CSGDSGGPLV

SEQ ID NO: 2637 - protein, 8 aa, Homo sapien
CSGKIVIA

SEQ ID NO: 2638 - protein, 10 aa, Homo sapien
CSGKIVIARY

SEQ ID NO: 2639 - protein, 10 aa, Homo sapien
CSPSCPLERF

SEQ ID NO: 2640 - protein, 11 aa, Homo sapien
CSPSCPLERFA

SEQ ID NO: 2641 - protein, 8 aa, Homo sapien
CTGAVPLI

SEQ ID NO: 2642 - protein, 8 aa, Homo sapien
CTPLMYSL

SEQ ID NO: 2643 - protein, 9 aa, Homo sapien
CTPLMYSLV

SEQ ID NO: 2644 - protein, 8 aa, Homo sapien
DAEEFGLL

SEQ ID NO: 2645 - protein, 10 aa, Homo sapien
DALFDIESKV

SEQ ID NO: 2646 - protein, 9 aa, Homo sapien
DAQKLLEKM

SEQ ID NO: 2647 - protein, 8 aa, Homo sapien
DAVKVMDL

SEQ ID NO: 2648 - protein, 11 aa, Homo sapien
DSGGPLVCNGV

SEQ ID NO: 2649 - protein, 11 aa, Homo sapien
DSGGPLVCNGV

SEQ ID NO: 2650 - protein, 10 aa, Homo sapien
DSLFSAVKNF

SEQ ID NO: 2651 - protein, 8 aa, Homo sapien
DSSHDLML

SEQ ID NO: 2652 - protein, 8 aa, Homo sapien
DSSHDLML

SEQ ID NO: 2653 - protein, 9 aa, Homo sapien
DSSHDLMLL

SEQ ID NO: 2654 - protein, 9 aa, Homo sapien
DSSHDLMLL

SEQ ID NO: 2655 - protein, 11 aa, Homo sapien
DSSHDLMLLRL

SEQ ID NO: 2656 - protein, 11 aa, Homo sapien
DSSHDLMLLRL

SEQ ID NO: 2657 - protein, 8 aa, Homo sapien
DSSIEGNY

SEQ ID NO: 2658 - protein, 10 aa, Homo sapien
DSSIEGNYTL

SEQ ID NO: 2659 - protein, 8 aa, Homo sapien
DSSWRGSL

SEQ ID NO: 2660 - protein, 10 aa, Homo sapien
DSSWRGSLKV

SEQ ID NO: 2661 - protein, 8 aa, Homo sapien
DSVELAHY

SEQ ID NO: 2662 - protein, 10 aa, Homo sapien
DSVELAHYDV

SEQ ID NO: 2663 - protein, 11 aa, Homo sapien
DSVELAHYDVL

SEQ ID NO: 2664 - protein, 8 aa, Homo sapien
DSWVFGGI

SEQ ID NO: 2665 - protein, 11 aa, Homo sapien
DTCGGDSGGPL

SEQ ID NO: 2666 - protein, 8 aa, Homo sapien
DTFPTDPI

SEQ ID NO: 2667 - protein, 8 aa, Homo sapien
DTGQRVPV

SEQ ID NO: 2668 - protein, 8 aa, Homo sapien
DTGQVFQV

SEQ ID NO: 2669 - protein, 9 aa, Homo sapien
DTMTKLREL

SEQ ID NO: 2670 - protein, 9 aa, Homo sapien
DTTVSGLQM

SEQ ID NO: 2671 - protein, 10 aa, Homo sapien
DTTVSGLQMA

SEQ ID NO: 2672 - protein, 11 aa, Homo sapien
DTTVSGLQMAL

SEQ ID NO: 2673 - protein, 11 aa, Homo sapien
EATNITPKHNM

SEQ ID NO: 2674 - protein, 8 aa, Homo sapien
EAVGLPSI

SEQ ID NO: 2675 - protein, 10 aa, Homo sapien
EAVGLPSIPV

SEQ ID NO: 2676 - protein, 10 aa, Homo sapien
ESETLKSEEF

SEQ ID NO: 2677 - protein, 9 aa, Homo sapien
ESFPGIYDA

SEQ ID NO: 2678 - protein, 10 aa, Homo sapien
ESFPGIYDAL

SEQ ID NO: 2679 - protein, 11 aa, Homo sapien
ESFPGIYDALF

SEQ ID NO: 2680 - protein, 9 aa, Homo sapien
ESKVDPSKA

SEQ ID NO: 2681 - protein, 10 aa, Homo sapien
ESKVDPSKAW

SEQ ID NO: 2682 - protein, 8 aa, Homo sapien
ESSWPQGF

SEQ ID NO: 2683 - protein, 11 aa, Homo sapien
ESSWPQGFGQL

SEQ ID NO: 2684 - protein, 8 aa, Homo sapien
ESVHNFTL

SEQ ID NO: 2685 - protein, 11 aa, Homo sapien
ESVHNFTLPSW

SEQ ID NO: 2686 - protein, 8 aa, Homo sapien
ESYKHEQV

SEQ ID NO: 2687 - protein, 9 aa, Homo sapien
ESYKHEQVY

SEQ ID NO: 2688 - protein, 10 aa, Homo sapien
ESYKHEQVYI

SEQ ID NO: 2689 - protein, 9 aa, Homo sapien
ETDSAVATA

SEQ ID NO: 2690 - protein, 8 aa, Homo sapien
ETLKSEEF

SEQ ID NO: 2691 - protein, 8 aa, Homo sapien
ETNKFSGY

SEQ ID NO: 2692 - protein, 10 aa, Homo sapien
ETNKFSGYPL

SEQ ID NO: 2693 - protein, 11 aa, Homo sapien
ETNKFSGYPLY

SEQ ID NO: 2694 - protein, 9 aa, Homo sapien
ETQHEPYPL

SEQ ID NO: 2695 - protein, 10 aa, Homo sapien
ETQHEPYPLM

SEQ ID NO: 2696 - protein, 11 aa, Homo sapien
ETQHEPYPLML

SEQ ID NO: 2697 - protein, 9 aa, Homo sapien
ETYELVEKF

SEQ ID NO: 2698 - protein, 10 aa, Homo sapien
ETYELVEKFY

SEQ ID NO: 2699 - protein, 8 aa, Homo sapien
FAELVGPV

SEQ ID NO: 2700 - protein, 9 aa, Homo sapien
FAELVGPVI

SEQ ID NO: 2701 - protein, 8 aa, Homo sapien
FAPGVKSY

SEQ ID NO: 2702 - protein, 9 aa, Homo sapien
FASWDAEEF

SEQ ID NO: 2703 - protein, 11 aa, Homo sapien
FASWDAEEFGL

SEQ ID NO: 2704 - protein, 9 aa, Homo sapien
FSAFSPQGM

SEQ ID NO: 2705 - protein, 10 aa, Homo sapien
FSAVKNFTEI

SEQ ID NO: 2706 - protein, 11 aa, Homo sapien
FSAVKNFTEIA

SEQ ID NO: 2707 - protein, 8 aa, Homo sapien
FSERLQDF

SEQ ID NO: 2708 - protein, 10 aa, Homo sapien
FSGMPRISKL

SEQ ID NO: 2709 - protein, 10 aa, Homo sapien
FSGYPLYHSV

SEQ ID NO: 2710 - protein, 11 aa, Homo sapien
FSGYPLYHSVY

SEQ ID NO: 2711 - protein, 11 aa, Homo sapien
FSPQGMPEGDL

SEQ ID NO: 2712 - protein, 8 aa, Homo sapien
FSTQKVKM

SEQ ID NO: 2713 - protein, 10 aa, Homo sapien
FSTQKVKMHI

SEQ ID NO: 2714 - protein, 8 aa, Homo sapien
FTEIASKF

SEQ ID NO: 2715 - protein, 10 aa, Homo sapien
FTGNFSTQKV

SEQ ID NO: 2716 - protein, 8 aa, Homo sapien
FTQIPHLA

SEQ ID NO: 2717 - protein, 10 aa, Homo sapien
FTVQAAAETL

SEQ ID NO: 2718 - protein, 10 aa, Homo sapien
GAAPLILSRI

SEQ ID NO: 2719 - protein, 11 aa, Homo sapien
GAAPLILSRIV

SEQ ID NO: 2720 - protein, 8 aa, Homo sapien
GAAVVHEI

SEQ ID NO: 2721 - protein, 9 aa, Homo sapien
GAAVVHEIV

SEQ ID NO: 2722 - protein, 10 aa, Homo sapien
GAGDPLTPGY

SEQ ID NO: 2723 - protein, 8 aa, Homo sapien
GAKGVILY

SEQ ID NO: 2724 - protein, 9 aa, Homo sapien
GALVLAGGF

SEQ ID NO: 2725 - protein, 10 aa, Homo sapien
GALVLAGGFF

SEQ ID NO: 2726 - protein, 11 aa, Homo sapien
GALVLAGGFFL

SEQ ID NO: 2727 - protein, 8 aa, Homo sapien
GAVEPDRY

SEQ ID NO: 2728 - protein, 9 aa, Homo sapien
GAVEPDRYV

SEQ ID NO: 2729 - protein, 10 aa, Homo sapien
GAVEPDRYVI

SEQ ID NO: 2730 - protein, 11 aa, Homo sapien
GAVEPDRYVIL

SEQ ID NO: 2731 - protein, 10 aa, Homo sapien
GAVPLIQSRI

SEQ ID NO: 2732 - protein, 11 aa, Homo sapien
GAVPLIQSRIV

SEQ ID NO: 2733 - protein, 9 aa, Homo sapien
GSAPPDSSW

SEQ ID NO: 2734 - protein, 8 aa, Homo sapien
GSGNDFEV

SEQ ID NO: 2735 - protein, 9 aa, Homo sapien
GSGNDFEVF

SEQ ID NO: 2736 - protein, 10 aa, Homo sapien
GSGNDFEVFF

SEQ ID NO: 2737 - protein, 8 aa, Homo sapien
GSIEPEEF

SEQ ID NO: 2738 - protein, 8 aa, Homo sapien
GSIEPEEF

SEQ ID NO: 2739 - protein, 9 aa, Homo sapien
GSIEPEEFL

SEQ ID NO: 2740 - protein, 9 aa, Homo sapien
GSIEPEEFL

SEQ ID NO: 2741 - protein, 9 aa, Homo sapien
GSLKVPYNV

SEQ ID NO: 2742 - protein, 8 aa, Homo sapien
GTEQNFQL

SEQ ID NO: 2743 - protein, 9 aa, Homo sapien
GTEQNFQLA

SEQ ID NO: 2744 - protein, 8 aa, Homo sapien
GTLKKEGW

SEQ ID NO: 2745 - protein, 9 aa, Homo sapien
GTTCYASGW

SEQ ID NO: 2746 - protein, 9 aa, Homo sapien
GTTCYASGW

SEQ ID NO: 2747 - protein, 8 aa, Homo sapien
HSFPHPLY

SEQ ID NO: 2748 - protein, 8 aa, Homo sapien
HSFPHPLY

SEQ ID NO: 2749 - protein, 10 aa, Homo sapien
HSFPHPLYDM

SEQ ID NO: 2750 - protein, 10 aa, Homo sapien
HSFPHPLYNM

SEQ ID NO: 2751 - protein, 8 aa, Homo sapien
HSQPWQVA

SEQ ID NO: 2752 - protein, 9 aa, Homo sapien
HSQPWQVAV

SEQ ID NO: 2753 - protein, 10 aa, Homo sapien
HSQPWQVAVY

SEQ ID NO: 2754 - protein, 8 aa, Homo sapien
HSQPWQVL

SEQ ID NO: 2755 - protein, 9 aa, Homo sapien
HSQPWQVLV

SEQ ID NO: 2756 - protein, 10 aa, Homo sapien
HSQPWQVLVA

SEQ ID NO: 2757 - protein, 9 aa, Homo sapien
HSTNEVTRI

SEQ ID NO: 2758 - protein, 10 aa, Homo sapien
HSTNEVTRIY

SEQ ID NO: 2759 - protein, 9 aa, Homo sapien
HSVYETYEL

SEQ ID NO: 2760 - protein, 10 aa, Homo sapien
HSVYETYELV

SEQ ID NO: 2761 - protein, 10 aa, Homo sapien
HTVPLSEDQL

SEQ ID NO: 2762 - protein, 11 aa, Homo sapien
HTVPLSEDQLL

SEQ ID NO: 2763 - protein, 10 aa, Homo sapien
IAEAVGLPSI

SEQ ID NO: 2764 - protein, 10 aa, Homo sapien
IALSVGCTGA

SEQ ID NO: 2765 - protein, 11 aa, Homo sapien
IALSVGCTGAV

SEQ ID NO: 2766 - protein, 8 aa, Homo sapien
IARYGKVF

SEQ ID NO: 2767 - protein, 8 aa, Homo sapien
IASGRARY

SEQ ID NO: 2768 - protein, 9 aa, Homo sapien
IASKFSERL

SEQ ID NO: 2769 - protein, 10 aa, Homo sapien
IATLGKLSGL

SEQ ID NO: 2770 - protein, 11 aa, Homo sapien
ISIINEDGNEI

SEQ ID NO: 2771 - protein, 10 aa, Homo sapien
ISKLGSGNDF

SEQ ID NO: 2772 - protein, 9 aa, Homo sapien
ISMKHPQEM

SEQ ID NO: 2773 - protein, 9 aa, Homo sapien
ISNDVCAQV

SEQ ID NO: 2774 - protein, 8 aa, Homo sapien
ITDVVKVL

SEQ ID NO: 2775 - protein, 10 aa, Homo sapien
ITDVVKVLGL

SEQ ID NO: 2776 - protein, 9 aa, Homo sapien
ITPKHNMKA

SEQ ID NO: 2777 - protein, 10 aa, Homo sapien
ITPKHNMKAF

SEQ ID NO: 2778 - protein, 11 aa, Homo sapien
ITPKHNMKAFL

SEQ ID NO: 2779 - protein, 10 aa, Homo sapien
ITSWGPEPCA

SEQ ID NO: 2780 - protein, 11 aa, Homo sapien
ITSWGPEPCAL

SEQ ID NO: 2781 - protein, 10 aa, Homo sapien
ITSWGSEPCA

SEQ ID NO: 2782 - protein, 11 aa, Homo sapien
ITSWGSEPCAL

SEQ ID NO: 2783 - protein, 8 aa, Homo sapien
KAENIKKF

SEQ ID NO: 2784 - protein, 9 aa, Homo sapien
KAENIKKFL

SEQ ID NO: 2785 - protein, 10 aa, Homo sapien
KAENIKKFLY

SEQ ID NO: 2786 - protein, 9 aa, Homo sapien
KAFLDELKA

SEQ ID NO: 2787 - protein, 10 aa, Homo sapien
KAWGEVKRQI

SEQ ID NO: 2788 - protein, 11 aa, Homo sapien
KAWGEVKRQIY

SEQ ID NO: 2789 - protein, 9 aa, Homo sapien
KSEEFQKRL

SEQ ID NO: 2790 - protein, 9 aa, Homo sapien
KSNPIVLRM

SEQ ID NO: 2791 - protein, 10 aa, Homo sapien
KSNPIVLRMM

SEQ ID NO: 2792 - protein, 10 aa, Homo sapien
KSPSPEFSGM

SEQ ID NO: 2793 - protein, 8 aa, Homo sapien
KSRLQGGV

SEQ ID NO: 2794 - protein, 9 aa, Homo sapien
KSRLQGGVL

SEQ ID NO: 2795 - protein, 10 aa, Homo sapien
KSRLQGGVLV

SEQ ID NO: 2796 - protein, 9 aa, Homo sapien
KSSNEATNI

SEQ ID NO: 2797 - protein, 11 aa, Homo sapien
KSVILLGRHSL

SEQ ID NO: 2798 - protein, 9 aa, Homo sapien
KSYPDGWNL

SEQ ID NO: 2799 - protein, 9 aa, Homo sapien
KTHPNYISI

SEQ ID NO: 2800 - protein, 10 aa, Homo sapien
KTHPNYISII

SEQ ID NO: 2801 - protein, 10 aa, Homo sapien
KTYSVSFDSL

SEQ ID NO: 2802 - protein, 11 aa, Homo sapien
KTYSVSFDSLF

SEQ ID NO: 2803 - protein, 10 aa, Homo sapien
LAALFPPEGV

SEQ ID NO: 2804 - protein, 8 aa, Homo sapien
LAGAKGVI

SEQ ID NO: 2805 - protein, 9 aa, Homo sapien
LAGAKGVIL

SEQ ID NO: 2806 - protein, 10 aa, Homo sapien
LAGAKGVILY

SEQ ID NO: 2807 - protein, 8 aa, Homo sapien
LAGGFFLL

SEQ ID NO: 2808 - protein, 10 aa, Homo sapien
LAGGFFLLGF

SEQ ID NO: 2809 - protein, 11 aa, Homo sapien
LAGGFFLLGFL

SEQ ID NO: 2810 - protein, 8 aa, Homo sapien
LAGTEQNF

SEQ ID NO: 2811 - protein, 10 aa, Homo sapien
LAGTEQNFQL

SEQ ID NO: 2812 - protein, 11 aa, Homo sapien
LAGTEQNFQLA

SEQ ID NO: 2813 - protein, 8 aa, Homo sapien
LAHYDVLL

SEQ ID NO: 2814 - protein, 10 aa, Homo sapien
LAHYDVLLSY

SEQ ID NO: 2815 - protein, 8 aa, Homo sapien
LAKELKFV

SEQ ID NO: 2816 - protein, 10 aa, Homo sapien
LAKELKFVTL

SEQ ID NO: 2817 - protein, 11 aa, Homo sapien
LAKELKFVTLV

SEQ ID NO: 2818 - protein, 9 aa, Homo sapien
LAKQIQSQW

SEQ ID NO: 2819 - protein, 9 aa, Homo sapien
LANSIVLPF

SEQ ID NO: 2820 - protein, 9 aa, Homo sapien
LARAASLSL

SEQ ID NO: 2821 - protein, 11 aa, Homo sapien
LARAASLSLGF

SEQ ID NO: 2822 - protein, 8 aa, Homo sapien
LSEDQLLY

SEQ ID NO: 2823 - protein, 9 aa, Homo sapien
LSEDQLLYL

SEQ ID NO: 2824 - protein, 11 aa, Homo sapien
LSEDQLLYLPF

SEQ ID NO: 2825 - protein, 9 aa, Homo sapien
LSELSLLSL

SEQ ID NO: 2826 - protein, 10 aa, Homo sapien
LSELSLLSLY

SEQ ID NO: 2827 - protein, 10 aa, Homo sapien
LSEPAELTDA

SEQ ID NO: 2828 - protein, 11 aa, Homo sapien
LSEPAELTDAV

SEQ ID NO: 2829 - protein, 10 aa, Homo sapien
LSEPAKITDV

SEQ ID NO: 2830 - protein, 11 aa, Homo sapien
LSEPAKITDVV

SEQ ID NO: 2831 - protein, 9 aa, Homo sapien
LSGLHGQDL

SEQ ID NO: 2832 - protein, 10 aa, Homo sapien
LSGLHGQDLF

SEQ ID NO: 2833 - protein, 8 aa, Homo sapien
LSLGFLFL

SEQ ID NO: 2834 - protein, 9 aa, Homo sapien
LSLGFLFLL

SEQ ID NO: 2835 - protein, 10 aa, Homo sapien
LSLGFLFLLF

SEQ ID NO: 2836 - protein, 11 aa, Homo sapien
LSLGFLFLLFF

SEQ ID NO: 2837 - protein, 9 aa, Homo sapien
LSLLSLYGI

SEQ ID NO: 2838 - protein, 9 aa, Homo sapien
LSNDMCARA

SEQ ID NO: 2839 - protein, 10 aa, Homo sapien
LSNDMCARAY

SEQ ID NO: 2840 - protein, 8 aa, Homo sapien
LSRIVGGW

SEQ ID NO: 2841 - protein, 8 aa, Homo sapien
LSVGCTGA

SEQ ID NO: 2842 - protein, 9 aa, Homo sapien
LSVGCTGAV

SEQ ID NO: 2843 - protein, 11 aa, Homo sapien
LSVGCTGAVPL

SEQ ID NO: 2844 - protein, 8 aa, Homo sapien
LSVTWIGA

SEQ ID NO: 2845 - protein, 9 aa, Homo sapien
LSVTWIGAA

SEQ ID NO: 2846 - protein, 11 aa, Homo sapien
LSVTWIGAAPL

SEQ ID NO: 2847 - protein, 11 aa, Homo sapien
LSYPNKTHPNY

SEQ ID NO: 2848 - protein, 8 aa, Homo sapien
LTDAVKVM

SEQ ID NO: 2849 - protein, 10 aa, Homo sapien
LTDAVKVMDL

SEQ ID NO: 2850 - protein, 11 aa, Homo sapien
LTELYFEKGEY

SEQ ID NO: 2851 - protein, 8 aa, Homo sapien
LTLSVTWI

SEQ ID NO: 2852 - protein, 10 aa, Homo sapien
LTLSVTWIGA

SEQ ID NO: 2853 - protein, 11 aa, Homo sapien
LTLSVTWIGAA

SEQ ID NO: 2854 - protein, 10 aa, Homo sapien
LTPGYPANEY

SEQ ID NO: 2855 - protein, 11 aa, Homo sapien
LTPGYPANEYA

SEQ ID NO: 2856 - protein, 9 aa, Homo sapien
LTPKKLQCV

SEQ ID NO: 2857 - protein, 11 aa, Homo sapien
LTPKKLQCVDL

SEQ ID NO: 2858 - protein, 10 aa, Homo sapien
LTQLGMEQHY

SEQ ID NO: 2859 - protein, 10 aa, Homo sapien
LTVAQVRGGM

SEQ ID NO: 2860 - protein, 11 aa, Homo sapien
LTVAQVRGGMV

SEQ ID NO: 2861 - protein, 9 aa, Homo sapien
MALDVYNGL

SEQ ID NO: 2862 - protein, 10 aa, Homo sapien
MALDVYNGLL

SEQ ID NO: 2863 - protein, 8 aa, Homo sapien
MSAMTNLA

SEQ ID NO: 2864 - protein, 9 aa, Homo sapien
MSAMTNLAA

SEQ ID NO: 2865 - protein, 10 aa, Homo sapien
MSAMTNLAAL

SEQ ID NO: 2866 - protein, 11 aa, Homo sapien
MSAMTNLAALF

SEQ ID NO: 2867 - protein, 9 aa, Homo sapien
MSLLKHQSL

SEQ ID NO: 2868 - protein, 8 aa, Homo sapien
MSLLKNRF

SEQ ID NO: 2869 - protein, 9 aa, Homo sapien
MSLLKNRFL

SEQ ID NO: 2870 - protein, 10 aa, Homo sapien
MTKLRELSEL

SEQ ID NO: 2871 - protein, 8 aa, Homo sapien
MTNLAALF

SEQ ID NO: 2872 - protein, 10 aa, Homo sapien
NADSSIEGNY

SEQ ID NO: 2873 - protein, 10 aa, Homo sapien
NAQLAGAKGV

SEQ ID NO: 2874 - protein, 11 aa, Homo sapien
NAQLAGAKGVI

SEQ ID NO: 2875 - protein, 11 aa, Homo sapien
NSQVWLGRHNL

SEQ ID NO: 2876 - protein, 10 aa, Homo sapien
NSRLLQERGV

SEQ ID NO: 2877 - protein, 11 aa, Homo sapien
NSRLLQERGVA

SEQ ID NO: 2878 - protein, 9 aa, Homo sapien
PADYFAPGV

SEQ ID NO: 2879 - protein, 8 aa, Homo sapien
PAELTDAV

SEQ ID NO: 2880 - protein, 10 aa, Homo sapien
PAELTDAVKV

SEQ ID NO: 2881 - protein, 11 aa, Homo sapien
PAELTDAVKVM

SEQ ID NO: 2882 - protein, 8 aa, Homo sapien
PAKITDVV

SEQ ID NO: 2883 - protein, 10 aa, Homo sapien
PAKITDVVKV

SEQ ID NO: 2884 - protein, 11 aa, Homo sapien
PAKITDVVKVL

SEQ ID NO: 2885 - protein, 8 aa, Homo sapien
PALGTTCY

SEQ ID NO: 2886 - protein, 8 aa, Homo sapien
PALGTTCY

SEQ ID NO: 2887 - protein, 9 aa, Homo sapien
PALGTTCYA

SEQ ID NO: 2888 - protein, 9 aa, Homo sapien
PALGTTCYA

SEQ ID NO: 2889 - protein, 11 aa, Homo sapien
PANEYAYRRGI

SEQ ID NO: 2890 - protein, 8 aa, Homo sapien
PAVYTKVV

SEQ ID NO: 2891 - protein, 10 aa, Homo sapien
PAVYTKVVHY

SEQ ID NO: 2892 - protein, 8 aa, Homo sapien
PSCPLERF

SEQ ID NO: 2893 - protein, 9 aa, Homo sapien
PSCPLERFA

SEQ ID NO: 2894 - protein, 11 aa, Homo sapien
PSCPLERFAEL

SEQ ID NO: 2895 - protein, 8 aa, Homo sapien
PSIPVHPI

SEQ ID NO: 2896 - protein, 10 aa, Homo sapien
PSIPVHPIGY

SEQ ID NO: 2897 - protein, 11 aa, Homo sapien
PSIPVHPIGYY

SEQ ID NO: 2898 - protein, 8 aa, Homo sapien
PSKAWGEV

SEQ ID NO: 2899 - protein, 8 aa, Homo sapien
PSLYTKVV

SEQ ID NO: 2900 - protein, 10 aa, Homo sapien
PSLYTKVVHY

SEQ ID NO: 2901 - protein, 8 aa, Homo sapien
PSPEFSGM

SEQ ID NO: 2902 - protein, 11 aa, Homo sapien
PSPEFSGMPRI

SEQ ID NO: 2903 - protein, 8 aa, Homo sapien
PSSHNKYA

SEQ ID NO: 2904 - protein, 9 aa, Homo sapien
PSWATEDTM

SEQ ID NO: 2905 - protein, 8 aa, Homo sapien
PSYKKLIM

SEQ ID NO: 2906 - protein, 9 aa, Homo sapien
PSYKKLIMY

SEQ ID NO: 2907 - protein, 11 aa, Homo sapien
PSYKKLIMYSA

SEQ ID NO: 2908 - protein, 10 aa, Homo sapien
PTDPIKESSW

SEQ ID NO: 2909 - protein, 10 aa, Homo sapien
QAAAETLSEV

SEQ ID NO: 2910 - protein, 11 aa, Homo sapien
QAAAETLSEVA

SEQ ID NO: 2911 - protein, 10 aa, Homo sapien
QSGAAVVHEI

SEQ ID NO: 2912 - protein, 11 aa, Homo sapien
QSGAAVVHEIV

SEQ ID NO: 2913 - protein, 9 aa, Homo sapien
QSQWKEFGL

SEQ ID NO: 2914 - protein, 8 aa, Homo sapien
QSRIVGGW

SEQ ID NO: 2915 - protein, 8 aa, Homo sapien
RAAPLLLA

SEQ ID NO: 2916 - protein, 10 aa, Homo sapien
RAAPLLLARA

SEQ ID NO: 2917 - protein, 11 aa, Homo sapien
RAAPLLLARAA

SEQ ID NO: 2918 - protein, 9 aa, Homo sapien
RAASLSLGF

SEQ ID NO: 2919 - protein, 10 aa, Homo sapien
RAASLSLGFL

SEQ ID NO: 2920 - protein, 11 aa, Homo sapien
RAASLSLGFLF

SEQ ID NO: 2921 - protein, 9 aa, Homo sapien
RAFIDPLGL

SEQ ID NO: 2922 - protein, 8 aa, Homo sapien
RARYTKNW

SEQ ID NO: 2923 - protein, 8 aa, Homo sapien
RATQIPSY

SEQ ID NO: 2924 - protein, 11 aa, Homo sapien
RATQIPSYKKL

SEQ ID NO: 2925 - protein, 8 aa, Homo sapien
RAVCGGVL

SEQ ID NO: 2926 - protein, 9 aa, Homo sapien
RAVCGGVLV

SEQ ID NO: 2927 - protein, 10 aa, Homo sapien
RAYSEKVTEF

SEQ ID NO: 2928 - protein, 11 aa, Homo sapien
RAYSEKVTEFM

SEQ ID NO: 2929 - protein, 11 aa, Homo sapien
RSFGTLKKEGW

SEQ ID NO: 2930 - protein, 8 aa, Homo sapien
RSLQCVSL

SEQ ID NO: 2931 - protein, 10 aa, Homo sapien
RSLQCVSLHL

SEQ ID NO: 2932 - protein, 11 aa, Homo sapien
RSLQCVSLHLL

SEQ ID NO: 2933 - protein, 9 aa, Homo sapien
RSTDVDRTL

SEQ ID NO: 2934 - protein, 10 aa, Homo sapien
RSTDVDRTLM

SEQ ID NO: 2935 - protein, 8 aa, Homo sapien
RSVLAKEL

SEQ ID NO: 2936 - protein, 10 aa, Homo sapien
RSVLAKELKF

SEQ ID NO: 2937 - protein, 11 aa, Homo sapien
RSVLAKELKFV

SEQ ID NO: 2938 - protein, 8 aa, Homo sapien
RTEDFFKL

SEQ ID NO: 2939 - protein, 8 aa, Homo sapien
RTILFASW

SEQ ID NO: 2940 - protein, 10 aa, Homo sapien
RTILFASWDA

SEQ ID NO: 2941 - protein, 10 aa, Homo sapien
RTLMSAMTNL

SEQ ID NO: 2942 - protein, 11 aa, Homo sapien
RTLMSAMTNLA

SEQ ID NO: 2943 - protein, 8 aa, Homo sapien
SAFSPQGM

SEQ ID NO: 2944 - protein, 10 aa, Homo sapien
SAHDTTVSGL

SEQ ID NO: 2945 - protein, 8 aa, Homo sapien
SAMTNLAA

SEQ ID NO: 2946 - protein, 9 aa, Homo sapien
SAMTNLAAL

SEQ ID NO: 2947 - protein, 10 aa, Homo sapien
SAMTNLAALF

SEQ ID NO: 2948 - protein, 8 aa, Homo sapien
SAPPDSSW

SEQ ID NO: 2949 - protein, 11 aa, Homo sapien
SAVATARRPRW

SEQ ID NO: 2950 - protein, 9 aa, Homo sapien
SAVKNFTEI

SEQ ID NO: 2951 - protein, 10 aa, Homo sapien
SAVKNFTEIA

SEQ ID NO: 2952 - protein, 8 aa, Homo sapien
SSHDLMLL

SEQ ID NO: 2953 - protein, 8 aa, Homo sapien
SSHDLMLL

SEQ ID NO: 2954 - protein, 10 aa, Homo sapien
SSHDLMLLRL

SEQ ID NO: 2955 - protein, 10 aa, Homo sapien
SSHDLMLLRL

SEQ ID NO: 2956 - protein, 11 aa, Homo sapien
SSHNKYAGESF

SEQ ID NO: 2957 - protein, 9 aa, Homo sapien
SSIEGNYTL

SEQ ID NO: 2958 - protein, 11 aa, Homo sapien
SSIEGNYTLRV

SEQ ID NO: 2959 - protein, 8 aa, Homo sapien
SSNEATNI

SEQ ID NO: 2960 - protein, 10 aa, Homo sapien
SSWPQGFGQL

SEQ ID NO: 2961 - protein, 9 aa, Homo sapien
SSWRGSLKV

SEQ ID NO: 2962 - protein, 11 aa, Homo sapien
SSWRGSLKVPY

SEQ ID NO: 2963 - protein, 11 aa, Homo sapien
STCSGDSGGPL

SEQ ID NO: 2964 - protein, 8 aa, Homo sapien
STDVDRTL

SEQ ID NO: 2965 - protein, 9 aa, Homo sapien
STDVDRTLM

SEQ ID NO: 2966 - protein, 11 aa, Homo sapien
STDVDRTLMSA

SEQ ID NO: 2967 - protein, 11 aa, Homo sapien
STEWAEENSRL

SEQ ID NO: 2968 - protein, 8 aa, Homo sapien
STNEVTRI

SEQ ID NO: 2969 - protein, 9 aa, Homo sapien
STNEVTRIY

SEQ ID NO: 2970 - protein, 11 aa, Homo sapien
STNEVTRIYNV

SEQ ID NO: 2971 - protein, 9 aa, Homo sapien
STQKVKMHI

SEQ ID NO: 2972 - protein, 11 aa, Homo sapien
TAAHCIRNKSV

SEQ ID NO: 2973 - protein, 8 aa, Homo sapien
TARRPRWL

SEQ ID NO: 2974 - protein, 10 aa, Homo sapien
TARRPRWLCA

SEQ ID NO: 2975 - protein, 11 aa, Homo sapien
TSLFEPPPPGY

SEQ ID NO: 2976 - protein, 9 aa, Homo sapien
TSWGPEPCA

SEQ ID NO: 2977 - protein, 10 aa, Homo sapien
TSWGPEPCAL

SEQ ID NO: 2978 - protein, 9 aa, Homo sapien
TSWGSEPCA

SEQ ID NO: 2979 - protein, 10 aa, Homo sapien
TSWGSEPCAL

SEQ ID NO: 2980 - protein, 8 aa, Homo sapien
TTCYASGW

SEQ ID NO: 2981 - protein, 8 aa, Homo sapien
TTCYASGW

SEQ ID NO: 2982 - protein, 11 aa, Homo sapien
TTCYASGWGSI

SEQ ID NO: 2983 - protein, 11 aa, Homo sapien
TTCYASGWGSI

SEQ ID NO: 2984 - protein, 8 aa, Homo sapien
TTVSGLQM

SEQ ID NO: 2985 - protein, 9 aa, Homo sapien
TTVSGLQMA

SEQ ID NO: 2986 - protein, 10 aa, Homo sapien
TTVSGLQMAL

SEQ ID NO: 2987 - protein, 8 aa, Homo sapien
VAAFTVQA

SEQ ID NO: 2988 - protein, 9 aa, Homo sapien
VAAFTVQAA

SEQ ID NO: 2989 - protein, 10 aa, Homo sapien
VAAFTVQAAA

SEQ ID NO: 2990 - protein, 8 aa, Homo sapien
VAQVRGGM

SEQ ID NO: 2991 - protein, 9 aa, Homo sapien
VAQVRGGMV

SEQ ID NO: 2992 - protein, 10 aa, Homo sapien
VAQVRGGMVF

SEQ ID NO: 2993 - protein, 8 aa, Homo sapien
VASRGRAV

SEQ ID NO: 2994 - protein, 9 aa, Homo sapien
VATARRPRW

SEQ ID NO: 2995 - protein, 10 aa, Homo sapien
VATARRPRWL

SEQ ID NO: 2996 - protein, 8 aa, Homo sapien
VAVYSHGW

SEQ ID NO: 2997 - protein, 9 aa, Homo sapien
VAVYSHGWA

SEQ ID NO: 2998 - protein, 10 aa, Homo sapien
VAYINADSSI

SEQ ID NO: 2999 - protein, 8 aa, Homo sapien
VSDIVPPF

SEQ ID NO: 3000 - protein, 10 aa, Homo sapien
VSDIVPPFSA

SEQ ID NO: 3001 - protein, 11 aa, Homo sapien
VSDIVPPFSAF

SEQ ID NO: 3002 - protein, 9 aa, Homo sapien
VSFDSLFSA

SEQ ID NO: 3003 - protein, 10 aa, Homo sapien
VSFDSLFSAV

SEQ ID NO: 3004 - protein, 8 aa, Homo sapien
VSGLQMAL

SEQ ID NO: 3005 - protein, 10 aa, Homo sapien
VSGLQMALDV

SEQ ID NO: 3006 - protein, 11 aa, Homo sapien
VSGLQMALDVY

SEQ ID NO: 3007 - protein, 9 aa, Homo sapien
VSHSFPHPL

SEQ ID NO: 3008 - protein, 9 aa, Homo sapien
VSHSFPHPL

SEQ ID NO: 3009 - protein, 10 aa, Homo sapien
VSHSFPHPLY

SEQ ID NO: 3010 - protein, 10 aa, Homo sapien
VSHSFPHPLY

SEQ ID NO: 3011 - protein, 8 aa, Homo sapien
VSIWNPIL

SEQ ID NO: 3012 - protein, 9 aa, Homo sapien
VSIWNPILL

SEQ ID NO: 3013 - protein, 10 aa, Homo sapien
VSIWNPILLW

SEQ ID NO: 3014 - protein, 10 aa, Homo sapien
VSLHLLSNDM

SEQ ID NO: 3015 - protein, 8 aa, Homo sapien
VTEFMLCA

SEQ ID NO: 3016 - protein, 10 aa, Homo sapien
VTEFMLCAGL

SEQ ID NO: 3017 - protein, 11 aa, Homo sapien
VTEFMLCAGLW

SEQ ID NO: 3018 - protein, 8 aa, Homo sapien
VTKFMLCA

SEQ ID NO: 3019 - protein, 11 aa, Homo sapien
VTKFMLCAGRW

SEQ ID NO: 3020 - protein, 8 aa, Homo sapien
VTRIYNVI

SEQ ID NO: 3021 - protein, 11 aa, Homo sapien
VTRIYNVIGTL

SEQ ID NO: 3022 - protein, 9 aa, Homo sapien
VTWIGAAPL

SEQ ID NO: 3023 - protein, 10 aa, Homo sapien
VTWIGAAPLI

SEQ ID NO: 3024 - protein, 11 aa, Homo sapien
VTWIGAAPLIL

SEQ ID NO: 3025 - protein, 8 aa, Homo sapien
WAEENSRL

SEQ ID NO: 3026 - protein, 9 aa, Homo sapien
WAEENSRLL

SEQ ID NO: 3027 - protein, 8 aa, Homo sapien
WAHCGGVL

SEQ ID NO: 3028 - protein, 9 aa, Homo sapien
WAHCGGVLV

SEQ ID NO: 3029 - protein, 10 aa, Homo sapien
WATEDTMTKL

SEQ ID NO: 3030 - protein, 8 aa, Homo sapien
WSKVYDPL

SEQ ID NO: 3031 - protein, 9 aa, Homo sapien
WSKVYDPLY

SEQ ID NO: 3032 - protein, 10 aa, Homo sapien
WTKKSPSPEF

SEQ ID NO: 3033 - protein, 8 aa, Homo sapien
YADKIYSI

SEQ ID NO: 3034 - protein, 10 aa, Homo sapien
YADKIYSISM

SEQ ID NO: 3035 - protein, 9 aa, Homo sapien
YAGESFPGI

SEQ ID NO: 3036 - protein, 10 aa, Homo sapien
YAGESFPGIY

SEQ ID NO: 3037 - protein, 9 aa, Homo sapien
YAPSSHNKY

SEQ ID NO: 3038 - protein, 10 aa, Homo sapien
YAPSSHNKYA

SEQ ID NO: 3039 - protein, 8 aa, Homo sapien
YARTEDFF

SEQ ID NO: 3040 - protein, 10 aa, Homo sapien
YARTEDFFKL

SEQ ID NO: 3041 - protein, 9 aa, Homo sapien
YASCHLTEL

SEQ ID NO: 3042 - protein, 10 aa, Homo sapien
YASCHLTELY

SEQ ID NO: 3043 - protein, 11 aa, Homo sapien
YASCHLTELYF

SEQ ID NO: 3044 - protein, 8 aa, Homo sapien
YASGWGSI

SEQ ID NO: 3045 - protein, 8 aa, Homo sapien
YASGWGSI

SEQ ID NO: 3046 - protein, 8 aa, Homo sapien
YAVVLRKY

SEQ ID NO: 3047 - protein, 9 aa, Homo sapien
YAVVLRKYA

SEQ ID NO: 3048 - protein, 8 aa, Homo sapien
YAYRRGIA

SEQ ID NO: 3049 - protein, 10 aa, Homo sapien
YAYRRGIAEA

SEQ ID NO: 3050 - protein, 11 aa, Homo sapien
YAYRRGIAEAV

SEQ ID NO: 3051 - protein, 8 aa, Homo sapien
YSAHDTTV

SEQ ID NO: 3052 - protein, 11 aa, Homo sapien
YSAHDTTVSGL

SEQ ID NO: 3053 - protein, 8 aa, Homo sapien
YSDPADYF

SEQ ID NO: 3054 - protein, 9 aa, Homo sapien
YSDPADYFA

SEQ ID NO: 3055 - protein, 8 aa, Homo sapien
YSEKVTEF

SEQ ID NO: 3056 - protein, 9 aa, Homo sapien
YSEKVTEFM

SEQ ID NO: 3057 - protein, 10 aa, Homo sapien
YSEKVTEFML

SEQ ID NO: 3058 - protein, 11 aa, Homo sapien
YSHGWAHCGGV

SEQ ID NO: 3059 - protein, 11 aa, Homo sapien
YSISMKHPQEM

SEQ ID NO: 3060 - protein, 11 aa, Homo sapien
YSLVHNLTKEL

SEQ ID NO: 3061 - protein, 8 aa, Homo sapien
YSVSFDSL

SEQ ID NO: 3062 - protein, 9 aa, Homo sapien
YSVSFDSLF

SEQ ID NO: 3063 - protein, 11 aa, Homo sapien
YSVSFDSLFSA

SEQ ID NO: 3064 - protein, 10 aa, Homo sapien
YTKNWETNKF

SEQ ID NO: 3065 - protein, 10 aa, Homo sapien
YTKVVHYRKW

SEQ ID NO: 3066 - protein, 10 aa, Homo sapien
YTKVVHYRKW

SEQ ID NO: 3067 - protein, 11 aa, Homo sapien
YTKVVHYRKWI

SEQ ID NO: 3068 - protein, 11 aa, Homo sapien
YTKVVHYRKWI

SEQ ID NO: 3069 - protein, 10 aa, Homo sapien
YTLRVDCTPL

SEQ ID NO: 3070 - protein, 11 aa, Homo sapien
YTLRVDCTPLM

SEQ ID NO: 3071 - protein, 8 aa, Homo sapien
ALDVYNGL

SEQ ID NO: 3072 - protein, 9 aa, Homo sapien
ALDVYNGLL

SEQ ID NO: 3073 - protein, 9 aa, Homo sapien
ALFDIESKV

SEQ ID NO: 3074 - protein, 8 aa, Homo sapien
ALFPPEGV

SEQ ID NO: 3075 - protein, 10 aa, Homo sapien
ALFPPEGVSI

SEQ ID NO: 3076 - protein, 11 aa, Homo sapien
ALFPPEGVSIW

SEQ ID NO: 3077 - protein, 8 aa, Homo sapien
ALGTTCYA

SEQ ID NO: 3078 - protein, 8 aa, Homo sapien
ALGTTCYA

SEQ ID NO: 3079 - protein, 11 aa, Homo sapien
ALGTTCYASGW

SEQ ID NO: 3080 - protein, 11 aa, Homo sapien
ALGTTCYASGW

SEQ ID NO: 3081 - protein, 8 aa, Homo sapien
ALPEKPAV

SEQ ID NO: 3082 - protein, 9 aa, Homo sapien
ALPEKPAVY

SEQ ID NO: 3083 - protein, 8 aa, Homo sapien
ALPERPSL

SEQ ID NO: 3084 - protein, 9 aa, Homo sapien
ALPERPSLY

SEQ ID NO: 3085 - protein, 9 aa, Homo sapien
ALSVGCTGA

SEQ ID NO: 3086 - protein, 10 aa, Homo sapien
ALSVGCTGAV

SEQ ID NO: 3087 - protein, 8 aa, Homo sapien
ALVLAGGF

SEQ ID NO: 3088 - protein, 9 aa, Homo sapien
ALVLAGGFF

SEQ ID NO: 3089 - protein, 10 aa, Homo sapien
ALVLAGGFFL

SEQ ID NO: 3090 - protein, 11 aa, Homo sapien
ALVLAGGFFLL

SEQ ID NO: 3091 - protein, 8 aa, Homo sapien
AMTNLAAL

SEQ ID NO: 3092 - protein, 9 aa, Homo sapien
AMTNLAALF

SEQ ID NO: 3093 - protein, 11 aa, Homo sapien
APGVKSYPDGW

SEQ ID NO: 3094 - protein, 8 aa, Homo sapien
APLILSRI

SEQ ID NO: 3095 - protein, 9 aa, Homo sapien
APLILSRIV

SEQ ID NO: 3096 - protein, 8 aa, Homo sapien
APLLLARA

SEQ ID NO: 3097 - protein, 9 aa, Homo sapien
APLLLARAA

SEQ ID NO: 3098 - protein, 11 aa, Homo sapien
APLLLARAASL

SEQ ID NO: 3099 - protein, 11 aa, Homo sapien
APPDSSWRGSL

SEQ ID NO: 3100 - protein, 8 aa, Homo sapien
APSSHNKY

SEQ ID NO: 3101 - protein, 9 aa, Homo sapien
APSSHNKYA

SEQ ID NO: 3102 - protein, 8 aa, Homo sapien
AQKLLEKM

SEQ ID NO: 3103 - protein, 9 aa, Homo sapien
AQLAGAKGV

SEQ ID NO: 3104 - protein, 10 aa, Homo sapien
AQLAGAKGVI

SEQ ID NO: 3105 - protein, 11 aa, Homo sapien
AQLAGAKGVIL

SEQ ID NO: 3106 - protein, 8 aa, Homo sapien
AQVHPQKV

SEQ ID NO: 3107 - protein, 11 aa, Homo sapien
AQVHPQKVTKF

SEQ ID NO: 3108 - protein, 8 aa, Homo sapien
AQVRGGMV

SEQ ID NO: 3109 - protein, 9 aa, Homo sapien
AQVRGGMVF

SEQ ID NO: 3110 - protein, 11 aa, Homo sapien
AQVRGGMVFEL

SEQ ID NO: 3111 - protein, 10 aa, Homo sapien
AVATARRPRW

SEQ ID NO: 3112 - protein, 11 aa, Homo sapien
AVATARRPRWL

SEQ ID NO: 3113 - protein, 8 aa, Homo sapien
AVCGGVLV

SEQ ID NO: 3114 - protein, 8 aa, Homo sapien
AVEPDRYV

SEQ ID NO: 3115 - protein, 9 aa, Homo sapien
AVEPDRYVI

SEQ ID NO: 3116 - protein, 10 aa, Homo sapien
AVEPDRYVIL

SEQ ID NO: 3117 - protein, 9 aa, Homo sapien
AVGLPSIPV

SEQ ID NO: 3118 - protein, 8 aa, Homo sapien
AVKNFTEI

SEQ ID NO: 3119 - protein, 9 aa, Homo sapien
AVKNFTEIA

SEQ ID NO: 3120 - protein, 9 aa, Homo sapien
AVPLIQSRI

SEQ ID NO: 3121 - protein, 10 aa, Homo sapien
AVPLIQSRIV

SEQ ID NO: 3122 - protein, 10 aa, Homo sapien
AVVHEIVRSF

SEQ ID NO: 3123 - protein, 8 aa, Homo sapien
AVVLRKYA

SEQ ID NO: 3124 - protein, 11 aa, Homo sapien
AVVLRKYADKI

SEQ ID NO: 3125 - protein, 8 aa, Homo sapien
AVYSHGWA

SEQ ID NO: 3126 - protein, 9 aa, Homo sapien
AVYTKVVHY

SEQ ID NO: 3127 - protein, 8 aa, Homo sapien
CIRNKSVI

SEQ ID NO: 3128 - protein, 9 aa, Homo sapien
CIRNKSVIL

SEQ ID NO: 3129 - protein, 10 aa, Homo sapien
CIRNKSVILL

SEQ ID NO: 3130 - protein, 8 aa, Homo sapien
CLKKNSQV

SEQ ID NO: 3131 - protein, 9 aa, Homo sapien
CLKKNSQVW

SEQ ID NO: 3132 - protein, 10 aa, Homo sapien
CLKKNSQVWL

SEQ ID NO: 3133 - protein, 9 aa, Homo sapien
CPLERFAEL

SEQ ID NO: 3134 - protein, 10 aa, Homo sapien
CPLERFAELV

SEQ ID NO: 3135 - protein, 11 aa, Homo sapien
CVDLHVISNDV

SEQ ID NO: 3136 - protein, 11 aa, Homo sapien
CVSLHLLSNDM

SEQ ID NO: 3137 - protein, 11 aa, Homo sapien
DIESKVDPSKA

SEQ ID NO: 3138 - protein, 8 aa, Homo sapien
DIVPPFSA

SEQ ID NO: 3139 - protein, 9 aa, Homo sapien
DIVPPFSAF

SEQ ID NO: 3140 - protein, 9 aa, Homo sapien
DLFGIWSKV

SEQ ID NO: 3141 - protein, 10 aa, Homo sapien
DLFGIWSKVY

SEQ ID NO: 3142 - protein, 9 aa, Homo sapien
DLHVISNDV

SEQ ID NO: 3143 - protein, 11 aa, Homo sapien
DLHVISNDVCA

SEQ ID NO: 3144 - protein, 11 aa, Homo sapien
DLMLLRLSEPA

SEQ ID NO: 3145 - protein, 11 aa, Homo sapien
DLMLLRLSEPA

SEQ ID NO: 3146 - protein, 8 aa, Homo sapien
DLPTQEPA

SEQ ID NO: 3147 - protein, 9 aa, Homo sapien
DLPTQEPAL

SEQ ID NO: 3148 - protein, 8 aa, Homo sapien
DLVLSIAL

SEQ ID NO: 3149 - protein, 10 aa, Homo sapien
DLVLSIALSV

SEQ ID NO: 3150 - protein, 8 aa, Homo sapien
DLVYVNYA

SEQ ID NO: 3151 - protein, 11 aa, Homo sapien
DMCARAYSEKV

SEQ ID NO: 3152 - protein, 10 aa, Homo sapien
DMKINCSGKI

SEQ ID NO: 3153 - protein, 11 aa, Homo sapien
DMKINCSGKIV

SEQ ID NO: 3154 - protein, 9 aa, Homo sapien
DMSLLKNRF

SEQ ID NO: 3155 - protein, 10 aa, Homo sapien
DMSLLKNRFL

SEQ ID NO: 3156 - protein, 10 aa, Homo sapien
DPADYFAPGV

SEQ ID NO: 3157 - protein, 8 aa, Homo sapien
DPIKESSW

SEQ ID NO: 3158 - protein, 10 aa, Homo sapien
DPLGLPDRPF

SEQ ID NO: 3159 - protein, 11 aa, Homo sapien
DPLGLPDRPFY

SEQ ID NO: 3160 - protein, 9 aa, Homo sapien
DPLTPGYPA

SEQ ID NO: 3161 - protein, 8 aa, Homo sapien
DPLYCESV

SEQ ID NO: 3162 - protein, 11 aa, Homo sapien
DPLYCESVHNF

SEQ ID NO: 3163 - protein, 8 aa, Homo sapien
DPMFKYHL

SEQ ID NO: 3164 - protein, 10 aa, Homo sapien
DPMFKYHLTV

SEQ ID NO: 3165 - protein, 11 aa, Homo sapien
DPMFKYHLTVA

SEQ ID NO: 3166 - protein, 8 aa, Homo sapien
DPQSGAAV

SEQ ID NO: 3167 - protein, 9 aa, Homo sapien
DPQSGAAVV

SEQ ID NO: 3168 - protein, 9 aa, Homo sapien
DPSKAWGEV

SEQ ID NO: 3169 - protein, 8 aa, Homo sapien
DQLLYLPF

SEQ ID NO: 3170 - protein, 9 aa, Homo sapien
DQLMFLERA

SEQ ID NO: 3171 - protein, 10 aa, Homo sapien
DQLMFLERAF

SEQ ID NO: 3172 - protein, 11 aa, Homo sapien
DQLMFLERAFI

SEQ ID NO: 3173 - protein, 11 aa, Homo sapien
DVCAQVHPQKV

SEQ ID NO: 3174 - protein, 9 aa, Homo sapien
DVDRTLMSA

SEQ ID NO: 3175 - protein, 10 aa, Homo sapien
DVDRTLMSAM

SEQ ID NO: 3176 - protein, 8 aa, Homo sapien
DVVKVLGL

SEQ ID NO: 3177 - protein, 10 aa, Homo sapien
DVYNGLLPPY

SEQ ID NO: 3178 - protein, 11 aa, Homo sapien
DVYNGLLPPYA

SEQ ID NO: 3179 - protein, 10 aa, Homo sapien
EIASKFSERL

SEQ ID NO: 3180 - protein, 8 aa, Homo sapien
EIFNTSLF

SEQ ID NO: 3181 - protein, 9 aa, Homo sapien
EILNHMKRA

SEQ ID NO: 3182 - protein, 9 aa, Homo sapien
EIVRSFGTL

SEQ ID NO: 3183 - protein, 8 aa, Homo sapien
ELAHYDVL

SEQ ID NO: 3184 - protein, 9 aa, Homo sapien
ELAHYDVLL

SEQ ID NO: 3185 - protein, 11 aa, Homo sapien
ELAHYDVLLSY

SEQ ID NO: 3186 - protein, 8 aa, Homo sapien
ELANSIVL

SEQ ID NO: 3187 - protein, 10 aa, Homo sapien
ELANSIVLPF

SEQ ID NO: 3188 - protein, 10 aa, Homo sapien
ELGEYIRKRY

SEQ ID NO: 3189 - protein, 10 aa, Homo sapien
ELKAENIKKF

SEQ ID NO: 3190 - protein, 11 aa, Homo sapien
ELKAENIKKFL

SEQ ID NO: 3191 - protein, 8 aa, Homo sapien
ELKFVTLV

SEQ ID NO: 3192 - protein, 9 aa, Homo sapien
ELKFVTLVF

SEQ ID NO: 3193 - protein, 9 aa, Homo sapien
ELKSPDEGF

SEQ ID NO: 3194 - protein, 8 aa, Homo sapien
ELSELSLL

SEQ ID NO: 3195 - protein, 10 aa, Homo sapien
ELSELSLLSL

SEQ ID NO: 3196 - protein, 11 aa, Homo sapien
ELSELSLLSLY

SEQ ID NO: 3197 - protein, 8 aa, Homo sapien
ELSLLSLY

SEQ ID NO: 3198 - protein, 10 aa, Homo sapien
ELSLLSLYGI

SEQ ID NO: 3199 - protein, 8 aa, Homo sapien
ELTDAVKV

SEQ ID NO: 3200 - protein, 9 aa, Homo sapien
ELTDAVKVM

SEQ ID NO: 3201 - protein, 11 aa, Homo sapien
ELTDAVKVMDL

SEQ ID NO: 3202 - protein, 10 aa, Homo sapien
ELVEKFYDPM

SEQ ID NO: 3203 - protein, 11 aa, Homo sapien
ELVEKFYDPMF

SEQ ID NO: 3204 - protein, 11 aa, Homo sapien
ELVGPVIPQDW

SEQ ID NO: 3205 - protein, 9 aa, Homo sapien
ELYFEKGEY

SEQ ID NO: 3206 - protein, 10 aa, Homo sapien
ELYFEKGEYF

SEQ ID NO: 3207 - protein, 11 aa, Homo sapien
ELYFEKGEYFV

SEQ ID NO: 3208 - protein, 9 aa, Homo sapien
EMKTYSVSF

SEQ ID NO: 3209 - protein, 8 aa, Homo sapien
EPAELTDA

SEQ ID NO: 3210 - protein, 9 aa, Homo sapien
EPAELTDAV

SEQ ID NO: 3211 - protein, 11 aa, Homo sapien
EPAELTDAVKV

SEQ ID NO: 3212 - protein, 8 aa, Homo sapien
EPAKITDV

SEQ ID NO: 3213 - protein, 9 aa, Homo sapien
EPAKITDVV

SEQ ID NO: 3214 - protein, 11 aa, Homo sapien
EPAKITDVVKV

SEQ ID NO: 3215 - protein, 9 aa, Homo sapien
EPALGTTCY

SEQ ID NO: 3216 - protein, 9 aa, Homo sapien
EPALGTTCY

SEQ ID NO: 3217 - protein, 10 aa, Homo sapien
EPALGTTCYA

SEQ ID NO: 3218 - protein, 10 aa, Homo sapien
EPALGTTCYA

SEQ ID NO: 3219 - protein, 10 aa, Homo sapien
EPCALPEKPA

SEQ ID NO: 3220 - protein, 11 aa, Homo sapien
EPCALPEKPAV

SEQ ID NO: 3221 - protein, 11 aa, Homo sapien
EPCALPERPSL

SEQ ID NO: 3222 - protein, 8 aa, Homo sapien
EPDRYVIL

SEQ ID NO: 3223 - protein, 9 aa, Homo sapien
EPEDTGQRV

SEQ ID NO: 3224 - protein, 11 aa, Homo sapien
EPEDTGQRVPV

SEQ ID NO: 3225 - protein, 11 aa, Homo sapien
EPEEFLRPRSL

SEQ ID NO: 3226 - protein, 11 aa, Homo sapien
EPEEFLTPKKL

SEQ ID NO: 3227 - protein, 10 aa, Homo sapien
EPPPPGYENV

SEQ ID NO: 3228 - protein, 9 aa, Homo sapien
EQHYELGEY

SEQ ID NO: 3229 - protein, 10 aa, Homo sapien
EQHYELGEYI

SEQ ID NO: 3230 - protein, 10 aa, Homo sapien
EQNFQLAKQI

SEQ ID NO: 3231 - protein, 10 aa, Homo sapien
EQVYIRSTDV

SEQ ID NO: 3232 - protein, 9 aa, Homo sapien
EVFFQRLGI

SEQ ID NO: 3233 - protein, 10 aa, Homo sapien
EVFFQRLGIA

SEQ ID NO: 3234 - protein, 8 aa, Homo sapien
EVKRQIYV

SEQ ID NO: 3235 - protein, 9 aa, Homo sapien
EVKRQIYVA

SEQ ID NO: 3236 - protein, 10 aa, Homo sapien
EVKRQIYVAA

SEQ ID NO: 3237 - protein, 11 aa, Homo sapien
EVKRQIYVAAF

SEQ ID NO: 3238 - protein, 8 aa, Homo sapien
EVTRIYNV

SEQ ID NO: 3239 - protein, 9 aa, Homo sapien
EVTRIYNVI

SEQ ID NO: 3240 - protein, 8 aa, Homo sapien
FIATLGKL

SEQ ID NO: 3241 - protein, 11 aa, Homo sapien
FIATLGKLSGL

SEQ ID NO: 3242 - protein, 8 aa, Homo sapien
FIKSSNEA

SEQ ID NO: 3243 - protein, 11 aa, Homo sapien
FIKSSNEATNI

SEQ ID NO: 3244 - protein, 10 aa, Homo sapien
FLDELKAENI

SEQ ID NO: 3245 - protein, 10 aa, Homo sapien
FLERAFIDPL

SEQ ID NO: 3246 - protein, 8 aa, Homo sapien
FLFLLFFW

SEQ ID NO: 3247 - protein, 9 aa, Homo sapien
FLFLLFFWL

SEQ ID NO: 3248 - protein, 11 aa, Homo sapien
FLLFFWLDRSV

SEQ ID NO: 3249 - protein, 9 aa, Homo sapien
FLLGFLFGW

SEQ ID NO: 3250 - protein, 10 aa, Homo sapien
FLLGFLFGWF

SEQ ID NO: 3251 - protein, 11 aa, Homo sapien
FLLGFLFGWFI

SEQ ID NO: 3252 - protein, 11 aa, Homo sapien
FLNESYKHEQV

SEQ ID NO: 3253 - protein, 10 aa, Homo sapien
FLRPRSLQCV

SEQ ID NO: 3254 - protein, 8 aa, Homo sapien
FLTLSVTW

SEQ ID NO: 3255 - protein, 9 aa, Homo sapien
FLTLSVTWI

SEQ ID NO: 3256 - protein, 11 aa, Homo sapien
FLTLSVTWIGA

SEQ ID NO: 3257 - protein, 10 aa, Homo sapien
FLTPKKLQCV

SEQ ID NO: 3258 - protein, 8 aa, Homo sapien
FLYNFTQI

SEQ ID NO: 3259 - protein, 11 aa, Homo sapien
FLYNFTQIPHL

SEQ ID NO: 3260 - protein, 8 aa, Homo sapien
FMLCAGLW

SEQ ID NO: 3261 - protein, 8 aa, Homo sapien
FMLCAGRW

SEQ ID NO: 3262 - protein, 8 aa, Homo sapien
FPGIYDAL

SEQ ID NO: 3263 - protein, 9 aa, Homo sapien
FPGIYDALF

SEQ ID NO: 3264 - protein, 11 aa, Homo sapien
FPGIYDALFDI

SEQ ID NO: 3265 - protein, 8 aa, Homo sapien
FPHPLYDM

SEQ ID NO: 3266 - protein, 10 aa, Homo sapien
FPHPLYDMSL

SEQ ID NO: 3267 - protein, 11 aa, Homo sapien
FPHPLYDMSLL

SEQ ID NO: 3268 - protein, 8 aa, Homo sapien
FPHPLYNM

SEQ ID NO: 3269 - protein, 10 aa, Homo sapien
FPHPLYNMSL

SEQ ID NO: 3270 - protein, 11 aa, Homo sapien
FPHPLYNMSLL

SEQ ID NO: 3271 - protein, 8 aa, Homo sapien
FPPEGVSI

SEQ ID NO: 3272 - protein, 9 aa, Homo sapien
FPPEGVSIW

SEQ ID NO: 3273 - protein, 11 aa, Homo sapien
FPTDPIKESSW

SEQ ID NO: 3274 - protein, 9 aa, Homo sapien
FQELESETL

SEQ ID NO: 3275 - protein, 8 aa, Homo sapien
FQKRLHPY

SEQ ID NO: 3276 - protein, 11 aa, Homo sapien
FQKRLHPYKDF

SEQ ID NO: 3277 - protein, 11 aa, Homo sapien
FQLAKQIQSQW

SEQ ID NO: 3278 - protein, 11 aa, Homo sapien
FQRLGIASGRA

SEQ ID NO: 3279 - protein, 11 aa, Homo sapien
FQVSHSFPHPL

SEQ ID NO: 3280 - protein, 8 aa, Homo sapien
GIAEAVGL

SEQ ID NO: 3281 - protein, 11 aa, Homo sapien
GIAEAVGLPSI

SEQ ID NO: 3282 - protein, 9 aa, Homo sapien
GIASGRARY

SEQ ID NO: 3283 - protein, 8 aa, Homo sapien
GIDPQSGA

SEQ ID NO: 3284 - protein, 9 aa, Homo sapien
GIDPQSGAA

SEQ ID NO: 3285 - protein, 10 aa, Homo sapien
GIDPQSGAAV

SEQ ID NO: 3286 - protein, 11 aa, Homo sapien
GIDPQSGAAVV

SEQ ID NO: 3287 - protein, 11 aa, Homo sapien
GIHKQKEKSRL

SEQ ID NO: 3288 - protein, 11 aa, Homo sapien
GITSWGPEPCA

SEQ ID NO: 3289 - protein, 11 aa, Homo sapien
GITSWGSEPCA

SEQ ID NO: 3290 - protein, 10 aa, Homo sapien
GIWSKVYDPL

SEQ ID NO: 3291 - protein, 11 aa, Homo sapien
GIWSKVYDPLY

SEQ ID NO: 3292 - protein, 9 aa, Homo sapien
GIYDALFDI

SEQ ID NO: 3293 - protein, 8 aa, Homo sapien
GLDSVELA

SEQ ID NO: 3294 - protein, 10 aa, Homo sapien
GLDSVELAHY

SEQ ID NO: 3295 - protein, 8 aa, Homo sapien
GLHGQDLF

SEQ ID NO: 3296 - protein, 10 aa, Homo sapien
GLHGQDLFGI

SEQ ID NO: 3297 - protein, 11 aa, Homo sapien
GLHGQDLFGIW

SEQ ID NO: 3298 - protein, 8 aa, Homo sapien
GLLGSTEW

SEQ ID NO: 3299 - protein, 9 aa, Homo sapien
GLLGSTEWA

SEQ ID NO: 3300 - protein, 11 aa, Homo sapien
GLLPPYASCHL

SEQ ID NO: 3301 - protein, 8 aa, Homo sapien
GLPDRPFY

SEQ ID NO: 3302 - protein, 11 aa, Homo sapien
GLPDRPFYRHV

SEQ ID NO: 3303 - protein, 10 aa, Homo sapien
GLPSIPVHPI

SEQ ID NO: 3304 - protein, 8 aa, Homo sapien
GLPTQEPA

SEQ ID NO: 3305 - protein, 9 aa, Homo sapien
GLPTQEPAL

SEQ ID NO: 3306 - protein, 8 aa, Homo sapien
GLQMALDV

SEQ ID NO: 3307 - protein, 9 aa, Homo sapien
GLQMALDVY

SEQ ID NO: 3308 - protein, 8 aa, Homo sapien
GMEQHYEL

SEQ ID NO: 3309 - protein, 11 aa, Homo sapien
GMEQHYELGEY

SEQ ID NO: 3310 - protein, 8 aa, Homo sapien
GMPEGDLV

SEQ ID NO: 3311 - protein, 9 aa, Homo sapien
GMPEGDLVY

SEQ ID NO: 3312 - protein, 10 aa, Homo sapien
GMPEGDLVYV

SEQ ID NO: 3313 - protein, 8 aa, Homo sapien
GMPRISKL

SEQ ID NO: 3314 - protein, 10 aa, Homo sapien
GMVFELANSI

SEQ ID NO: 3315 - protein, 11 aa, Homo sapien
GMVFELANSIV

SEQ ID NO: 3316 - protein, 8 aa, Homo sapien
GPGFTGNF

SEQ ID NO: 3317 - protein, 8 aa, Homo sapien
GPLVCNGV

SEQ ID NO: 3318 - protein, 8 aa, Homo sapien
GPLVCNGV

SEQ ID NO: 3319 - protein, 9 aa, Homo sapien
GPLVCNGVL

SEQ ID NO: 3320 - protein, 9 aa, Homo sapien
GPLVCNGVL

SEQ ID NO: 3321 - protein, 8 aa, Homo sapien
GPVIPQDW

SEQ ID NO: 3322 - protein, 8 aa, Homo sapien
GQDLFGIW

SEQ ID NO: 3323 - protein, 11 aa, Homo sapien
GQDLFGIWSKV

SEQ ID NO: 3324 - protein, 8 aa, Homo sapien
GQLTQLGM

SEQ ID NO: 3325 - protein, 10 aa, Homo sapien
GQRVPVSHSF

SEQ ID NO: 3326 - protein, 10 aa, Homo sapien
GQVFQVSHSF

SEQ ID NO: 3327 - protein, 11 aa, Homo sapien
GVAYINADSSI

SEQ ID NO: 3328 - protein, 9 aa, Homo sapien
GVILYSDPA

SEQ ID NO: 3329 - protein, 11 aa, Homo sapien
GVILYSDPADY

SEQ ID NO: 3330 - protein, 9 aa, Homo sapien
GVKSYPDGW

SEQ ID NO: 3331 - protein, 11 aa, Homo sapien
GVKSYPDGWNL

SEQ ID NO: 3332 - protein, 9 aa, Homo sapien
GVLQGITSW

SEQ ID NO: 3333 - protein, 9 aa, Homo sapien
GVLQGITSW

SEQ ID NO: 3334 - protein, 8 aa, Homo sapien
GVLVHPQW

SEQ ID NO: 3335 - protein, 8 aa, Homo sapien
GVLVHPQW

SEQ ID NO: 3336 - protein, 9 aa, Homo sapien
GVLVHPQWV

SEQ ID NO: 3337 - protein, 9 aa, Homo sapien
GVLVHPQWV

SEQ ID NO: 3338 - protein, 10 aa, Homo sapien
GVLVHPQWVL

SEQ ID NO: 3339 - protein, 10 aa, Homo sapien
GVLVHPQWVL

SEQ ID NO: 3340 - protein, 8 aa, Homo sapien
GVLVNEIL

SEQ ID NO: 3341 - protein, 11 aa, Homo sapien
GVLVNEILNHM

SEQ ID NO: 3342 - protein, 8 aa, Homo sapien
GVQRGNIL

SEQ ID NO: 3343 - protein, 10 aa, Homo sapien
GVQRGNILNL

SEQ ID NO: 3344 - protein, 8 aa, Homo sapien
GVSIWNPI

SEQ ID NO: 3345 - protein, 9 aa, Homo sapien
GVSIWNPIL

SEQ ID NO: 3346 - protein, 10 aa, Homo sapien
GVSIWNPILL

SEQ ID NO: 3347 - protein, 11 aa, Homo sapien
GVSIWNPILLW

SEQ ID NO: 3348 - protein, 8 aa, Homo sapien
HIHSTNEV

SEQ ID NO: 3349 - protein, 11 aa, Homo sapien
HIHSTNEVTRI

SEQ ID NO: 3350 - protein, 9 aa, Homo sapien
HLAGTEQNF

SEQ ID NO: 3351 - protein, 11 aa, Homo sapien
HLAGTEQNFQL

SEQ ID NO: 3352 - protein, 9 aa, Homo sapien
HLLSNDMCA

SEQ ID NO: 3353 - protein, 11 aa, Homo sapien
HLLSNDMCARA

SEQ ID NO: 3354 - protein, 11 aa, Homo sapien
HLTVAQVRGGM

SEQ ID NO: 3355 - protein, 8 aa, Homo sapien
HMKRATQI

SEQ ID NO: 3356 - protein, 11 aa, Homo sapien
HMKRATQIPSY

SEQ ID NO: 3357 - protein, 8 aa, Homo sapien
HPEDTGQV

SEQ ID NO: 3358 - protein, 9 aa, Homo sapien
HPEDTGQVF

SEQ ID NO: 3359 - protein, 11 aa, Homo sapien
HPEDTGQVFQV

SEQ ID NO: 3360 - protein, 8 aa, Homo sapien
HPIGYYDA

SEQ ID NO: 3361 - protein, 11 aa, Homo sapien
HPIGYYDAQKL

SEQ ID NO: 3362 - protein, 8 aa, Homo sapien
HPLYDMSL

SEQ ID NO: 3363 - protein, 9 aa, Homo sapien
HPLYDMSLL

SEQ ID NO: 3364 - protein, 8 aa, Homo sapien
HPLYNMSL

SEQ ID NO: 3365 - protein, 9 aa, Homo sapien
HPLYNMSLL

SEQ ID NO: 3366 - protein, 8 aa, Homo sapien
HPNYISII

SEQ ID NO: 3367 - protein, 8 aa, Homo sapien
HPQEMKTY

SEQ ID NO: 3368 - protein, 10 aa, Homo sapien
HPQEMKTYSV

SEQ ID NO: 3369 - protein, 8 aa, Homo sapien
HPQKVTKF

SEQ ID NO: 3370 - protein, 9 aa, Homo sapien
HPQKVTKFM

SEQ ID NO: 3371 - protein, 10 aa, Homo sapien
HPQKVTKFML

SEQ ID NO: 3372 - protein, 8 aa, Homo sapien
HPQWVLTA

SEQ ID NO: 3373 - protein, 8 aa, Homo sapien
HPQWVLTA

SEQ ID NO: 3374 - protein, 9 aa, Homo sapien
HPQWVLTAA

SEQ ID NO: 3375 - protein, 9 aa, Homo sapien
HPQWVLTAA

SEQ ID NO: 3376 - protein, 8 aa, Homo sapien
HPYKDFIA

SEQ ID NO: 3377 - protein, 10 aa, Homo sapien
HPYKDFIATL

SEQ ID NO: 3378 - protein, 9 aa, Homo sapien
HVISNDVCA

SEQ ID NO: 3379 - protein, 11 aa, Homo sapien
HVISNDVCAQV

SEQ ID NO: 3380 - protein, 9 aa, Homo sapien
IINEDGNEI

SEQ ID NO: 3381 - protein, 10 aa, Homo sapien
IINEDGNEIF

SEQ ID NO: 3382 - protein, 8 aa, Homo sapien
ILFASWDA

SEQ ID NO: 3383 - protein, 11 aa, Homo sapien
ILFASWDAEEF

SEQ ID NO: 3384 - protein, 9 aa, Homo sapien
ILGGHRDSW

SEQ ID NO: 3385 - protein, 10 aa, Homo sapien
ILGGHRDSWV

SEQ ID NO: 3386 - protein, 11 aa, Homo sapien
ILGGHRDSWVF

SEQ ID NO: 3387 - protein, 8 aa, Homo sapien
ILLGRHSL

SEQ ID NO: 3388 - protein, 9 aa, Homo sapien
ILLGRHSLF

SEQ ID NO: 3389 - protein, 9 aa, Homo sapien
ILLWQPIPV

SEQ ID NO: 3390 - protein, 8 aa, Homo sapien
ILNHMKRA

SEQ ID NO: 3391 - protein, 11 aa, Homo sapien
ILNHMKRATQI

SEQ ID NO: 3392 - protein, 11 aa, Homo sapien
ILNLNGAGDPL

SEQ ID NO: 3393 - protein, 9 aa, Homo sapien
ILSRIVGGW

SEQ ID NO: 3394 - protein, 9 aa, Homo sapien
ILYSDPADY

SEQ ID NO: 3395 - protein, 10 aa, Homo sapien
ILYSDPADYF

SEQ ID NO: 3396 - protein, 11 aa, Homo sapien
ILYSDPADYFA

SEQ ID NO: 3397 - protein, 10 aa, Homo sapien
IMYSAHDTTV

SEQ ID NO: 3398 - protein, 11 aa, Homo sapien
IPHLAGTEQNF

SEQ ID NO: 3399 - protein, 10 aa, Homo sapien
IPQDWSTECM

SEQ ID NO: 3400 - protein, 8 aa, Homo sapien
IPSYKKLI

SEQ ID NO: 3401 - protein, 9 aa, Homo sapien
IPSYKKLIM

SEQ ID NO: 3402 - protein, 10 aa, Homo sapien
IPSYKKLIMY

SEQ ID NO: 3403 - protein, 8 aa, Homo sapien
IPVHPIGY

SEQ ID NO: 3404 - protein, 9 aa, Homo sapien
IPVHPIGYY

SEQ ID NO: 3405 - protein, 11 aa, Homo sapien
IPVHPIGYYDA

SEQ ID NO: 3406 - protein, 8 aa, Homo sapien
IPVHTVPL

SEQ ID NO: 3407 - protein, 8 aa, Homo sapien
IQSQWKEF

SEQ ID NO: 3408 - protein, 10 aa, Homo sapien
IQSQWKEFGL

SEQ ID NO: 3409 - protein, 9 aa, Homo sapien
IQSRIVGGW

SEQ ID NO: 3410 - protein, 9 aa, Homo sapien
IVIARYGKV

SEQ ID NO: 3411 - protein, 10 aa, Homo sapien
IVIARYGKVF

SEQ ID NO: 3412 - protein, 10 aa, Homo sapien
IVLPFDCRDY

SEQ ID NO: 3413 - protein, 11 aa, Homo sapien
IVLPFDCRDYA

SEQ ID NO: 3414 - protein, 10 aa, Homo sapien
IVLRMMNDQL

SEQ ID NO: 3415 - protein, 11 aa, Homo sapien
IVLRMMNDQLM

SEQ ID NO: 3416 - protein, 8 aa, Homo sapien
IVPPFSAF

SEQ ID NO: 3417 - protein, 8 aa, Homo sapien
IVRSFGTL

SEQ ID NO: 3418 - protein, 8 aa, Homo sapien
KINCSGKI

SEQ ID NO: 3419 - protein, 9 aa, Homo sapien
KINCSGKIV

SEQ ID NO: 3420 - protein, 10 aa, Homo sapien
KINCSGKIVI

SEQ ID NO: 3421 - protein, 11 aa, Homo sapien
KINCSGKIVIA

SEQ ID NO: 3422 - protein, 8 aa, Homo sapien
KITDVVKV

SEQ ID NO: 3423 - protein, 9 aa, Homo sapien
KITDVVKVL

SEQ ID NO: 3424 - protein, 11 aa, Homo sapien
KITDVVKVLGL

SEQ ID NO: 3425 - protein, 10 aa, Homo sapien
KIVIARYGKV

SEQ ID NO: 3426 - protein, 11 aa, Homo sapien
KIVIARYGKVF

SEQ ID NO: 3427 - protein, 8 aa, Homo sapien
KLERDMKI

SEQ ID NO: 3428 - protein, 8 aa, Homo sapien
KLGSGNDF

SEQ ID NO: 3429 - protein, 10 aa, Homo sapien
KLGSGNDFEV

SEQ ID NO: 3430 - protein, 11 aa, Homo sapien
KLGSGNDFEVF

SEQ ID NO: 3431 - protein, 10 aa, Homo sapien
KLLEKMGGSA

SEQ ID NO: 3432 - protein, 9 aa, Homo sapien
KLQCVDLHV

SEQ ID NO: 3433 - protein, 10 aa, Homo sapien
KLQCVDLHVI

SEQ ID NO: 3434 - protein, 8 aa, Homo sapien
KLRELSEL

SEQ ID NO: 3435 - protein, 10 aa, Homo sapien
KLRELSELSL

SEQ ID NO: 3436 - protein, 11 aa, Homo sapien
KLRELSELSLL

SEQ ID NO: 3437 - protein, 10 aa, Homo sapien
KLSGLHGQDL

SEQ ID NO: 3438 - protein, 11 aa, Homo sapien
KLSGLHGQDLF

SEQ ID NO: 3439 - protein, 10 aa, Homo sapien
KMHIHSTNEV

SEQ ID NO: 3440 - protein, 8 aa, Homo sapien
KPAVYTKV

SEQ ID NO: 3441 - protein, 9 aa, Homo sapien
KPAVYTKVV

SEQ ID NO: 3442 - protein, 11 aa, Homo sapien
KPAVYTKVVHY

SEQ ID NO: 3443 - protein, 10 aa, Homo sapien
KQIQSQWKEF

SEQ ID NO: 3444 - protein, 8 aa, Homo sapien
KQKEKSRL

SEQ ID NO: 3445 - protein, 8 aa, Homo sapien
KVDPSKAW

SEQ ID NO: 3446 - protein, 11 aa, Homo sapien
KVDPSKAWGEV

SEQ ID NO: 3447 - protein, 8 aa, Homo sapien
KVFRGNKV

SEQ ID NO: 3448 - protein, 11 aa, Homo sapien
KVFRGNKVKNA

SEQ ID NO: 3449 - protein, 8 aa, Homo sapien
KVKNAQLA

SEQ ID NO: 3450 - protein, 10 aa, Homo sapien
KVKNAQLAGA

SEQ ID NO: 3451 - protein, 11 aa, Homo sapien
KVLGLPTQEPA

SEQ ID NO: 3452 - protein, 11 aa, Homo sapien
KVMDLPTQEPA

SEQ ID NO: 3453 - protein, 10 aa, Homo sapien
KVPYNVGPGF

SEQ ID NO: 3454 - protein, 9 aa, Homo sapien
KVTEFMLCA

SEQ ID NO: 3455 - protein, 11 aa, Homo sapien
KVTEFMLCAGL

SEQ ID NO: 3456 - protein, 9 aa, Homo sapien
KVTKFMLCA

SEQ ID NO: 3457 - protein, 8 aa, Homo sapien
KVVHYRKW

SEQ ID NO: 3458 - protein, 8 aa, Homo sapien
KVVHYRKW

SEQ ID NO: 3459 - protein, 9 aa, Homo sapien
KVVHYRKWI

SEQ ID NO: 3460 - protein, 9 aa, Homo sapien
KVVHYRKWI

SEQ ID NO: 3461 - protein, 11 aa, Homo sapien
KVYDPLYCESV

SEQ ID NO: 3462 - protein, 10 aa, Homo sapien
LILSRIVGGW

SEQ ID NO: 3463 - protein, 11 aa, Homo sapien
LIMYSAHDTTV

SEQ ID NO: 3464 - protein, 10 aa, Homo sapien
LIQSRIVGGW

SEQ ID NO: 3465 - protein, 8 aa, Homo sapien
LLARAASL

SEQ ID NO: 3466 - protein, 10 aa, Homo sapien
LLARAASLSL

SEQ ID NO: 3467 - protein, 9 aa, Homo sapien
LLEKMGGSA

SEQ ID NO: 3468 - protein, 10 aa, Homo sapien
LLFFWLDRSV

SEQ ID NO: 3469 - protein, 11 aa, Homo sapien
LLFFWLDRSVL

SEQ ID NO: 3470 - protein, 8 aa, Homo sapien
LLGFLFGW

SEQ ID NO: 3471 - protein, 9 aa, Homo sapien
LLGFLFGWF

SEQ ID NO: 3472 - protein, 10 aa, Homo sapien
LLGFLFGWFI

SEQ ID NO: 3473 - protein, 8 aa, Homo sapien
LLGRHSLF

SEQ ID NO: 3474 - protein, 8 aa, Homo sapien
LLGSTEWA

SEQ ID NO: 3475 - protein, 8 aa, Homo sapien
LLHETDSA

SEQ ID NO: 3476 - protein, 9 aa, Homo sapien
LLHETDSAV

SEQ ID NO: 3477 - protein, 10 aa, Homo sapien
LLHETDSAVA

SEQ ID NO: 3478 - protein, 9 aa, Homo sapien
LLLARAASL

SEQ ID NO: 3479 - protein, 11 aa, Homo sapien
LLLARAASLSL

SEQ ID NO: 3480 - protein, 10 aa, Homo sapien
LLPPYASCHL

SEQ ID NO: 3481 - protein, 8 aa, Homo sapien
LLQERGVA

SEQ ID NO: 3482 - protein, 9 aa, Homo sapien
LLQERGVAY

SEQ ID NO: 3483 - protein, 10 aa, Homo sapien
LLQERGVAYI

SEQ ID NO: 3484 - protein, 8 aa, Homo sapien
LLRLSEPA

SEQ ID NO: 3485 - protein, 8 aa, Homo sapien
LLRLSEPA

SEQ ID NO: 3486 - protein, 10 aa, Homo sapien
LLRLSEPAEL

SEQ ID NO: 3487 - protein, 10 aa, Homo sapien
LLRLSEPAKI

SEQ ID NO: 3488 - protein, 8 aa, Homo sapien
LLSNDMCA

SEQ ID NO: 3489 - protein, 10 aa, Homo sapien
LLSNDMCARA

SEQ ID NO: 3490 - protein, 11 aa, Homo sapien
LLSNDMCARAY

SEQ ID NO: 3491 - protein, 8 aa, Homo sapien
LLWQPIPV

SEQ ID NO: 3492 - protein, 11 aa, Homo sapien
LLWQPIPVHTV

SEQ ID NO: 3493 - protein, 8 aa, Homo sapien
LMFLERAF

SEQ ID NO: 3494 - protein, 9 aa, Homo sapien
LMFLERAFI

SEQ ID NO: 3495 - protein, 10 aa, Homo sapien
LMLLRLSEPA

SEQ ID NO: 3496 - protein, 10 aa, Homo sapien
LMLLRLSEPA

SEQ ID NO: 3497 - protein, 8 aa, Homo sapien
LMSAMTNL

SEQ ID NO: 3498 - protein, 9 aa, Homo sapien
LMSAMTNLA

SEQ ID NO: 3499 - protein, 10 aa, Homo sapien
LMSAMTNLAA

SEQ ID NO: 3500 - protein, 11 aa, Homo sapien
LMSAMTNLAAL

SEQ ID NO: 3501 - protein, 9 aa, Homo sapien
LMYSLVHNL

SEQ ID NO: 3502 - protein, 10 aa, Homo sapien
LPDRPFYRHV

SEQ ID NO: 3503 - protein, 11 aa, Homo sapien
LPDRPFYRHVI

SEQ ID NO: 3504 - protein, 8 aa, Homo sapien
LPEKPAVY

SEQ ID NO: 3505 - protein, 11 aa, Homo sapien
LPEKPAVYTKV

SEQ ID NO: 3506 - protein, 8 aa, Homo sapien
LPERPSLY

SEQ ID NO: 3507 - protein, 11 aa, Homo sapien
LPERPSLYTKV

SEQ ID NO: 3508 - protein, 8 aa, Homo sapien
LPFDCRDY

SEQ ID NO: 3509 - protein, 9 aa, Homo sapien
LPFDCRDYA

SEQ ID NO: 3510 - protein, 10 aa, Homo sapien
LPFDCRDYAV

SEQ ID NO: 3511 - protein, 11 aa, Homo sapien
LPFDCRDYAVV

SEQ ID NO: 3512 - protein, 9 aa, Homo sapien
LPFRNCPRF

SEQ ID NO: 3513 - protein, 10 aa, Homo sapien
LPGCSPSCPL

SEQ ID NO: 3514 - protein, 11 aa, Homo sapien
LPGGGVQRGNI

SEQ ID NO: 3515 - protein, 9 aa, Homo sapien
LPPYASCHL

SEQ ID NO: 3516 - protein, 9 aa, Homo sapien
LPSIPVHPI

SEQ ID NO: 3517 - protein, 11 aa, Homo sapien
LPSIPVHPIGY

SEQ ID NO: 3518 - protein, 10 aa, Homo sapien
LPSWATEDTM

SEQ ID NO: 3519 - protein, 8 aa, Homo sapien
LPTQEPAL

SEQ ID NO: 3520 - protein, 8 aa, Homo sapien
LPTQEPAL

SEQ ID NO: 3521 - protein, 8 aa, Homo sapien
LQCVDLHV

SEQ ID NO: 3522 - protein, 9 aa, Homo sapien
LQCVDLHVI

SEQ ID NO: 3523 - protein, 8 aa, Homo sapien
LQCVSLHL

SEQ ID NO: 3524 - protein, 9 aa, Homo sapien
LQCVSLHLL

SEQ ID NO: 3525 - protein, 10 aa, Homo sapien
LQDFDKSNPI

SEQ ID NO: 3526 - protein, 11 aa, Homo sapien
LQDFDKSNPIV

SEQ ID NO: 3527 - protein, 8 aa, Homo sapien
LQERGVAY

SEQ ID NO: 3528 - protein, 9 aa, Homo sapien
LQERGVAYI

SEQ ID NO: 3529 - protein, 11 aa, Homo sapien
LQERGVAYINA

SEQ ID NO: 3530 - protein, 10 aa, Homo sapien
LQGGVLVNEI

SEQ ID NO: 3531 - protein, 11 aa, Homo sapien
LQGGVLVNEIL

SEQ ID NO: 3532 - protein, 8 aa, Homo sapien
LQMALDVY

SEQ ID NO: 3533 - protein, 11 aa, Homo sapien
LQMALDVYNGL

SEQ ID NO: 3534 - protein, 8 aa, Homo sapien
LVASRGRA

SEQ ID NO: 3535 - protein, 9 aa, Homo sapien
LVASRGRAV

SEQ ID NO: 3536 - protein, 10 aa, Homo sapien
LVCNGVLQGI

SEQ ID NO: 3537 - protein, 10 aa, Homo sapien
LVCNGVLQGI

SEQ ID NO: 3538 - protein, 9 aa, Homo sapien
LVEKFYDPM

SEQ ID NO: 3539 - protein, 10 aa, Homo sapien
LVEKFYDPMF

SEQ ID NO: 3540 - protein, 11 aa, Homo sapien
LVFRHGDRSPI

SEQ ID NO: 3541 - protein, 10 aa, Homo sapien
LVGPVIPQDW

SEQ ID NO: 3542 - protein, 9 aa, Homo sapien
LVHNLTKEL

SEQ ID NO: 3543 - protein, 8 aa, Homo sapien
LVHPQWVL

SEQ ID NO: 3544 - protein, 8 aa, Homo sapien
LVHPQWVL

SEQ ID NO: 3545 - protein, 10 aa, Homo sapien
LVHPQWVLTA

SEQ ID NO: 3546 - protein, 10 aa, Homo sapien
LVHPQWVLTA

SEQ ID NO: 3547 - protein, 11 aa, Homo sapien
LVHPQWVLTAA

SEQ ID NO: 3548 - protein, 11 aa, Homo sapien
LVHPQWVLTAA

SEQ ID NO: 3549 - protein, 8 aa, Homo sapien
LVLAGGFF

SEQ ID NO: 3550 - protein, 9 aa, Homo sapien
LVLAGGFFL

SEQ ID NO: 3551 - protein, 10 aa, Homo sapien
LVLAGGFFLL

SEQ ID NO: 3552 - protein, 9 aa, Homo sapien
LVLSIALSV

SEQ ID NO: 3553 - protein, 9 aa, Homo sapien
LVNEILNHM

SEQ ID NO: 3554 - protein, 9 aa, Homo sapien
MLLRLSEPA

SEQ ID NO: 3555 - protein, 9 aa, Homo sapien
MLLRLSEPA

SEQ ID NO: 3556 - protein, 11 aa, Homo sapien
MLLRLSEPAEL

SEQ ID NO: 3557 - protein, 11 aa, Homo sapien
MLLRLSEPAKI

SEQ ID NO: 3558 - protein, 11 aa, Homo sapien
MLPGCSPSCPL

SEQ ID NO: 3559 - protein, 8 aa, Homo sapien
MMNDQLMF

SEQ ID NO: 3560 - protein, 9 aa, Homo sapien
MMNDQLMFL

SEQ ID NO: 3561 - protein, 8 aa, Homo sapien
MPEGDLVY

SEQ ID NO: 3562 - protein, 9 aa, Homo sapien
MPEGDLVYV

SEQ ID NO: 3563 - protein, 11 aa, Homo sapien
MPEGDLVYVNY

SEQ ID NO: 3564 - protein, 9 aa, Homo sapien
MVFELANSI

SEQ ID NO: 3565 - protein, 10 aa, Homo sapien
MVFELANSIV

SEQ ID NO: 3566 - protein, 11 aa, Homo sapien
MVFELANSIVL

SEQ ID NO: 3567 - protein, 9 aa, Homo sapien
NIKKFLYNF

SEQ ID NO: 3568 - protein, 8 aa, Homo sapien
NILNLNGA

SEQ ID NO: 3569 - protein, 8 aa, Homo sapien
NITPKHNM

SEQ ID NO: 3570 - protein, 10 aa, Homo sapien
NITPKHNMKA

SEQ ID NO: 3571 - protein, 11 aa, Homo sapien
NITPKHNMKAF

SEQ ID NO: 3572 - protein, 11 aa, Homo sapien
NLAALFPPEGV

SEQ ID NO: 3573 - protein, 9 aa, Homo sapien
NLLHETDSA

SEQ ID NO: 3574 - protein, 10 aa, Homo sapien
NLLHETDSAV

SEQ ID NO: 3575 - protein, 11 aa, Homo sapien
NLLHETDSAVA

SEQ ID NO: 3576 - protein, 9 aa, Homo sapien
NLNGAGDPL

SEQ ID NO: 3577 - protein, 9 aa, Homo sapien
NMKAFLDEL

SEQ ID NO: 3578 - protein, 11 aa, Homo sapien
NMKAFLDELKA

SEQ ID NO: 3579 - protein, 10 aa, Homo sapien
NMSLLKHQSL

SEQ ID NO: 3580 - protein, 9 aa, Homo sapien
NPILLWQPI

SEQ ID NO: 3581 - protein, 11 aa, Homo sapien
NPILLWQPIPV

SEQ ID NO: 3582 - protein, 8 aa, Homo sapien
NPIVLRMM

SEQ ID NO: 3583 - protein, 10 aa, Homo sapien
NVGPGFTGNF

SEQ ID NO: 3584 - protein, 9 aa, Homo sapien
NVIGTLRGA

SEQ ID NO: 3585 - protein, 10 aa, Homo sapien
NVIGTLRGAV

SEQ ID NO: 3586 - protein, 9 aa, Homo sapien
NVSDIVPPF

SEQ ID NO: 3587 - protein, 11 aa, Homo sapien
NVSDIVPPFSA

SEQ ID NO: 3588 - protein, 10 aa, Homo sapien
PIDTFPTDPI

SEQ ID NO: 3589 - protein, 10 aa, Homo sapien
PIGYYDAQKL

SEQ ID NO: 3590 - protein, 11 aa, Homo sapien
PIGYYDAQKLL

SEQ ID NO: 3591 - protein, 11 aa, Homo sapien
PIKESSWPQGF

SEQ ID NO: 3592 - protein, 8 aa, Homo sapien
PILLWQPI

SEQ ID NO: 3593 - protein, 10 aa, Homo sapien
PILLWQPIPV

SEQ ID NO: 3594 - protein, 9 aa, Homo sapien
PIPVHTVPL

SEQ ID NO: 3595 - protein, 11 aa, Homo sapien
PIVLRMMNDQL

SEQ ID NO: 3596 - protein, 8 aa, Homo sapien
PLERFAEL

SEQ ID NO: 3597 - protein, 9 aa, Homo sapien
PLERFAELV

SEQ ID NO: 3598 - protein, 9 aa, Homo sapien
PLGLPDRPF

SEQ ID NO: 3599 - protein, 10 aa, Homo sapien
PLGLPDRPFY

SEQ ID NO: 3600 - protein, 8 aa, Homo sapien
PLILSRIV

SEQ ID NO: 3601 - protein, 11 aa, Homo sapien
PLILSRIVGGW

SEQ ID NO: 3602 - protein, 8 aa, Homo sapien
PLIQSRIV

SEQ ID NO: 3603 - protein, 11 aa, Homo sapien
PLIQSRIVGGW

SEQ ID NO: 3604 - protein, 8 aa, Homo sapien
PLLLARAA

SEQ ID NO: 3605 - protein, 10 aa, Homo sapien
PLLLARAASL

SEQ ID NO: 3606 - protein, 10 aa, Homo sapien
PLMYSLVHNL

SEQ ID NO: 3607 - protein, 8 aa, Homo sapien
PLSEDQLL

SEQ ID NO: 3608 - protein, 9 aa, Homo sapien
PLSEDQLLY

SEQ ID NO: 3609 - protein, 10 aa, Homo sapien
PLSEDQLLYL

SEQ ID NO: 3610 - protein, 8 aa, Homo sapien
PLTPGYPA

SEQ ID NO: 3611 - protein, 11 aa, Homo sapien
PLTPGYPANEY

SEQ ID NO: 3612 - protein, 8 aa, Homo sapien
PLVCNGVL

SEQ ID NO: 3613 - protein, 8 aa, Homo sapien
PLVCNGVL

SEQ ID NO: 3614 - protein, 11 aa, Homo sapien
PLVCNGVLQGI

SEQ ID NO: 3615 - protein, 11 aa, Homo sapien
PLVCNGVLQGI

SEQ ID NO: 3616 - protein, 10 aa, Homo sapien
PLYCESVHNF

SEQ ID NO: 3617 - protein, 8 aa, Homo sapien
PLYDMSLL

SEQ ID NO: 3618 - protein, 10 aa, Homo sapien
PLYHSVYETY

SEQ ID NO: 3619 - protein, 8 aa, Homo sapien
PLYNMSLL

SEQ ID NO: 3620 - protein, 9 aa, Homo sapien
PMFKYHLTV

SEQ ID NO: 3621 - protein, 10 aa, Homo sapien
PMFKYHLTVA

SEQ ID NO: 3622 - protein, 10 aa, Homo sapien
PPDSSWRGSL

SEQ ID NO: 3623 - protein, 8 aa, Homo sapien
PPEGVSIW

SEQ ID NO: 3624 - protein, 11 aa, Homo sapien
PPEGVSIWNPI

SEQ ID NO: 3625 - protein, 11 aa, Homo sapien
PPFSAFSPQGM

SEQ ID NO: 3626 - protein, 10 aa, Homo sapien
PPGYENVSDI

SEQ ID NO: 3627 - protein, 11 aa, Homo sapien
PPGYENVSDIV

SEQ ID NO: 3628 - protein, 8 aa, Homo sapien
PPPGYENV

SEQ ID NO: 3629 - protein, 11 aa, Homo sapien
PPPGYENVSDI

SEQ ID NO: 3630 - protein, 9 aa, Homo sapien
PPPPGYENV

SEQ ID NO: 3631 - protein, 8 aa, Homo sapien
PPYASCHL

SEQ ID NO: 3632 - protein, 11 aa, Homo sapien
PPYASCHLTEL

SEQ ID NO: 3633 - protein, 9 aa, Homo sapien
PQDWSTECM

SEQ ID NO: 3634 - protein, 9 aa, Homo sapien
PQEMKTYSV

SEQ ID NO: 3635 - protein, 11 aa, Homo sapien
PQEMKTYSVSF

SEQ ID NO: 3636 - protein, 10 aa, Homo sapien
PQGFGQLTQL

SEQ ID NO: 3637 - protein, 9 aa, Homo sapien
PQGMPEGDL

SEQ ID NO: 3638 - protein, 10 aa, Homo sapien
PQGMPEGDLV

SEQ ID NO: 3639 - protein, 11 aa, Homo sapien
PQGMPEGDLVY

SEQ ID NO: 3640 - protein, 8 aa, Homo sapien
PQKVTKFM

SEQ ID NO: 3641 - protein, 9 aa, Homo sapien
PQKVTKFML

SEQ ID NO: 3642 - protein, 11 aa, Homo sapien
PQKVTKFMLCA

SEQ ID NO: 3643 - protein, 8 aa, Homo sapien
PQSGAAVV

SEQ ID NO: 3644 - protein, 11 aa, Homo sapien
PQSGAAVVHEI

SEQ ID NO: 3645 - protein, 8 aa, Homo sapien
PQWVLTAA

SEQ ID NO: 3646 - protein, 8 aa, Homo sapien
PQWVLTAA

SEQ ID NO: 3647 - protein, 11 aa, Homo sapien
PQWVLTAAHCI

SEQ ID NO: 3648 - protein, 11 aa, Homo sapien
PQWVLTAAHCL

SEQ ID NO: 3649 - protein, 8 aa, Homo sapien
PVHPIGYY

SEQ ID NO: 3650 - protein, 10 aa, Homo sapien
PVHPIGYYDA

SEQ ID NO: 3651 - protein, 10 aa, Homo sapien
PVSHSFPHPL

SEQ ID NO: 3652 - protein, 11 aa, Homo sapien
PVSHSFPHPLY

SEQ ID NO: 3653 - protein, 8 aa, Homo sapien
QIPSYKKL

SEQ ID NO: 3654 - protein, 9 aa, Homo sapien
QIPSYKKLI

SEQ ID NO: 3655 - protein, 10 aa, Homo sapien
QIPSYKKLIM

SEQ ID NO: 3656 - protein, 11 aa, Homo sapien
QIPSYKKLIMY

SEQ ID NO: 3657 - protein, 9 aa, Homo sapien
QIQSQWKEF

SEQ ID NO: 3658 - protein, 11 aa, Homo sapien
QIQSQWKEFGL

SEQ ID NO: 3659 - protein, 9 aa, Homo sapien
QIYVAAFTV

SEQ ID NO: 3660 - protein, 11 aa, Homo sapien
QIYVAAFTVQA

SEQ ID NO: 3661 - protein, 8 aa, Homo sapien
QLAGAKGV

SEQ ID NO: 3662 - protein, 9 aa, Homo sapien
QLAGAKGVI

SEQ ID NO: 3663 - protein, 10 aa, Homo sapien
QLAGAKGVIL

SEQ ID NO: 3664 - protein, 11 aa, Homo sapien
QLAGAKGVILY

SEQ ID NO: 3665 - protein, 10 aa, Homo sapien
QLAKQIQSQW

SEQ ID NO: 3666 - protein, 8 aa, Homo sapien
QLGMEQHY

SEQ ID NO: 3667 - protein, 10 aa, Homo sapien
QLGMEQHYEL

SEQ ID NO: 3668 - protein, 8 aa, Homo sapien
QLMFLERA

SEQ ID NO: 3669 - protein, 9 aa, Homo sapien
QLMFLERAF

SEQ ID NO: 3670 - protein, 10 aa, Homo sapien
QLMFLERAFI

SEQ ID NO: 3671 - protein, 11 aa, Homo sapien
QLTQLGMEQHY

SEQ ID NO: 3672 - protein, 10 aa, Homo sapien
QMALDVYNGL

SEQ ID NO: 3673 - protein, 11 aa, Homo sapien
QMALDVYNGLL

SEQ ID NO: 3674 - protein, 8 aa, Homo sapien
QPIPVHTV

SEQ ID NO: 3675 - protein, 10 aa, Homo sapien
QPIPVHTVPL

SEQ ID NO: 3676 - protein, 8 aa, Homo sapien
QPWQVAVY

SEQ ID NO: 3677 - protein, 8 aa, Homo sapien
QPWQVLVA

SEQ ID NO: 3678 - protein, 9 aa, Homo sapien
QVAVYSHGW

SEQ ID NO: 3679 - protein, 10 aa, Homo sapien
QVAVYSHGWA

SEQ ID NO: 3680 - protein, 9 aa, Homo sapien
QVFQVSHSF

SEQ ID NO: 3681 - protein, 10 aa, Homo sapien
QVHPQKVTKF

SEQ ID NO: 3682 - protein, 11 aa, Homo sapien
QVHPQKVTKFM

SEQ ID NO: 3683 - protein, 10 aa, Homo sapien
QVLVASRGRA

SEQ ID NO: 3684 - protein, 11 aa, Homo sapien
QVLVASRGRAV

SEQ ID NO: 3685 - protein, 8 aa, Homo sapien
QVRGGMVF

SEQ ID NO: 3686 - protein, 10 aa, Homo sapien
QVRGGMVFEL

SEQ ID NO: 3687 - protein, 11 aa, Homo sapien
QVRGGMVFELA

SEQ ID NO: 3688 - protein, 10 aa, Homo sapien
QVSHSFPHPL

SEQ ID NO: 3689 - protein, 11 aa, Homo sapien
QVSHSFPHPLY

SEQ ID NO: 3690 - protein, 9 aa, Homo sapien
QVWLGRHNL

SEQ ID NO: 3691 - protein, 10 aa, Homo sapien
QVWLGRHNLF

SEQ ID NO: 3692 - protein, 9 aa, Homo sapien
QVYIRSTDV

SEQ ID NO: 3693 - protein, 11 aa, Homo sapien
RISKLGSGNDF

SEQ ID NO: 3694 - protein, 9 aa, Homo sapien
RIYNVIGTL

SEQ ID NO: 3695 - protein, 9 aa, Homo sapien
RLGIASGRA

SEQ ID NO: 3696 - protein, 11 aa, Homo sapien
RLGIASGRARY

SEQ ID NO: 3697 - protein, 8 aa, Homo sapien
RLHPYKDF

SEQ ID NO: 3698 - protein, 9 aa, Homo sapien
RLHPYKDFI

SEQ ID NO: 3699 - protein, 10 aa, Homo sapien
RLHPYKDFIA

SEQ ID NO: 3700 - protein, 8 aa, Homo sapien
RLLQERGV

SEQ ID NO: 3701 - protein, 9 aa, Homo sapien
RLLQERGVA

SEQ ID NO: 3702 - protein, 10 aa, Homo sapien
RLLQERGVAY

SEQ ID NO: 3703 - protein, 11 aa, Homo sapien
RLLQERGVAYI

SEQ ID NO: 3704 - protein, 11 aa, Homo sapien
RLQDFDKSNPI

SEQ ID NO: 3705 - protein, 8 aa, Homo sapien
RLQGGVLV

SEQ ID NO: 3706 - protein, 11 aa, Homo sapien
RLQGGVLVNEI

SEQ ID NO: 3707 - protein, 8 aa, Homo sapien
RLSEPAEL

SEQ ID NO: 3708 - protein, 11 aa, Homo sapien
RLSEPAELTDA

SEQ ID NO: 3709 - protein, 8 aa, Homo sapien
RLSEPAKI

SEQ ID NO: 3710 - protein, 11 aa, Homo sapien
RLSEPAKITDV

SEQ ID NO: 3711 - protein, 8 aa, Homo sapien
RMMNDQLM

SEQ ID NO: 3712 - protein, 9 aa, Homo sapien
RMMNDQLMF

SEQ ID NO: 3713 - protein, 10 aa, Homo sapien
RMMNDQLMFL

SEQ ID NO: 3714 - protein, 10 aa, Homo sapien
RPDEDSSHDL

SEQ ID NO: 3715 - protein, 11 aa, Homo sapien
RPDEDSSHDLM

SEQ ID NO: 3716 - protein, 8 aa, Homo sapien
RPFYRHVI

SEQ ID NO: 3717 - protein, 9 aa, Homo sapien
RPFYRHVIY

SEQ ID NO: 3718 - protein, 10 aa, Homo sapien
RPFYRHVIYA

SEQ ID NO: 3719 - protein, 10 aa, Homo sapien
RPGDDSSHDL

SEQ ID NO: 3720 - protein, 11 aa, Homo sapien
RPGDDSSHDLM

SEQ ID NO: 3721 - protein, 8 aa, Homo sapien
RPRRTILF

SEQ ID NO: 3722 - protein, 9 aa, Homo sapien
RPRRTILFA

SEQ ID NO: 3723 - protein, 11 aa, Homo sapien
RPRRTILFASW

SEQ ID NO: 3724 - protein, 8 aa, Homo sapien
RPRSLQCV

SEQ ID NO: 3725 - protein, 10 aa, Homo sapien
RPRSLQCVSL

SEQ ID NO: 3726 - protein, 9 aa, Homo sapien
RPRWLCAGA

SEQ ID NO: 3727 - protein, 10 aa, Homo sapien
RPRWLCAGAL

SEQ ID NO: 3728 - protein, 11 aa, Homo sapien
RPRWLCAGALV

SEQ ID NO: 3729 - protein, 8 aa, Homo sapien
RPSLYTKV

SEQ ID NO: 3730 - protein, 9 aa, Homo sapien
RPSLYTKVV

SEQ ID NO: 3731 - protein, 11 aa, Homo sapien
RPSLYTKVVHY

SEQ ID NO: 3732 - protein, 8 aa, Homo sapien
RQIYVAAF

SEQ ID NO: 3733 - protein, 10 aa, Homo sapien
RQIYVAAFTV

SEQ ID NO: 3734 - protein, 8 aa, Homo sapien
RVDCTPLM

SEQ ID NO: 3735 - protein, 9 aa, Homo sapien
RVDCTPLMY

SEQ ID NO: 3736 - protein, 11 aa, Homo sapien
RVDCTPLMYSL

SEQ ID NO: 3737 - protein, 8 aa, Homo sapien
RVPVSHSF

SEQ ID NO: 3738 - protein, 11 aa, Homo sapien
SIALSVGCTGA

SEQ ID NO: 3739 - protein, 8 aa, Homo sapien
SIEGNYTL

SEQ ID NO: 3740 - protein, 10 aa, Homo sapien
SIEGNYTLRV

SEQ ID NO: 3741 - protein, 8 aa, Homo sapien
SIEPEEFL

SEQ ID NO: 3742 - protein, 8 aa, Homo sapien
SIEPEEFL

SEQ ID NO: 3743 - protein, 10 aa, Homo sapien
SIINEDGNEI

SEQ ID NO: 3744 - protein, 11 aa, Homo sapien
SIINEDGNEIF

SEQ ID NO: 3745 - protein, 9 aa, Homo sapien
SIPVHPIGY

SEQ ID NO: 3746 - protein, 10 aa, Homo sapien
SIPVHPIGYY

SEQ ID NO: 3747 - protein, 10 aa, Homo sapien
SISMKHPQEM

SEQ ID NO: 3748 - protein, 11 aa, Homo sapien
SIVLPFDCRDY

SEQ ID NO: 3749 - protein, 8 aa, Homo sapien
SIWNPILL

SEQ ID NO: 3750 - protein, 9 aa, Homo sapien
SIWNPILLW

SEQ ID NO: 3751 - protein, 10 aa, Homo sapien
SLFEPPPPGY

SEQ ID NO: 3752 - protein, 11 aa, Homo sapien
SLFHPEDTGQV

SEQ ID NO: 3753 - protein, 9 aa, Homo sapien
SLFSAVKNF

SEQ ID NO: 3754 - protein, 8 aa, Homo sapien
SLGFLFLL

SEQ ID NO: 3755 - protein, 9 aa, Homo sapien
SLGFLFLLF

SEQ ID NO: 3756 - protein, 10 aa, Homo sapien
SLGFLFLLFF

SEQ ID NO: 3757 - protein, 11 aa, Homo sapien
SLGFLFLLFFW

SEQ ID NO: 3758 - protein, 9 aa, Homo sapien
SLHLLSNDM

SEQ ID NO: 3759 - protein, 11 aa, Homo sapien
SLHLLSNDMCA

SEQ ID NO: 3760 - protein, 8 aa, Homo sapien
SLKVPYNV

SEQ ID NO: 3761 - protein, 8 aa, Homo sapien
SLLKHQSL

SEQ ID NO: 3762 - protein, 8 aa, Homo sapien
SLLKNRFL

SEQ ID NO: 3763 - protein, 8 aa, Homo sapien
SLLSLYGI

SEQ ID NO: 3764 - protein, 9 aa, Homo sapien
SLQCVSLHL

SEQ ID NO: 3765 - protein, 10 aa, Homo sapien
SLQCVSLHLL

SEQ ID NO: 3766 - protein, 8 aa, Homo sapien
SLSLGFLF

SEQ ID NO: 3767 - protein, 9 aa, Homo sapien
SLSLGFLFL

SEQ ID NO: 3768 - protein, 10 aa, Homo sapien
SLSLGFLFLL

SEQ ID NO: 3769 - protein, 11 aa, Homo sapien
SLSLGFLFLLF

SEQ ID NO: 3770 - protein, 10 aa, Homo sapien
SLVHNLTKEL

SEQ ID NO: 3771 - protein, 9 aa, Homo sapien
SLYTKVVHY

SEQ ID NO: 3772 - protein, 8 aa, Homo sapien
SMKHPQEM

SEQ ID NO: 3773 - protein, 11 aa, Homo sapien
SMKHPQEMKTY

SEQ ID NO: 3774 - protein, 11 aa, Homo sapien
SPDEGFEGKSL

SEQ ID NO: 3775 - protein, 10 aa, Homo sapien
SPEFSGMPRI

SEQ ID NO: 3776 - protein, 11 aa, Homo sapien
SPIDTFPTDPI

SEQ ID NO: 3777 - protein, 10 aa, Homo sapien
SPQGMPEGDL

SEQ ID NO: 3778 - protein, 11 aa, Homo sapien
SPQGMPEGDLV

SEQ ID NO: 3779 - protein, 9 aa, Homo sapien
SPSCPLERF

SEQ ID NO: 3780 - protein, 10 aa, Homo sapien
SPSCPLERFA

SEQ ID NO: 3781 - protein, 9 aa, Homo sapien
SPSPEFSGM

SEQ ID NO: 3782 - protein, 8 aa, Homo sapien
SQPWQVAV

SEQ ID NO: 3783 - protein, 9 aa, Homo sapien
SQPWQVAVY

SEQ ID NO: 3784 - protein, 8 aa, Homo sapien
SQPWQVLV

SEQ ID NO: 3785 - protein, 9 aa, Homo sapien
SQPWQVLVA

SEQ ID NO: 3786 - protein, 10 aa, Homo sapien
SQVWLGRHNL

SEQ ID NO: 3787 - protein, 11 aa, Homo sapien
SQVWLGRHNLF

SEQ ID NO: 3788 - protein, 8 aa, Homo sapien
SQWKEFGL

SEQ ID NO: 3789 - protein, 11 aa, Homo sapien
SQWKEFGLDSV

SEQ ID NO: 3790 - protein, 9 aa, Homo sapien
SVELAHYDV

SEQ ID NO: 3791 - protein, 10 aa, Homo sapien
SVELAHYDVL

SEQ ID NO: 3792 - protein, 11 aa, Homo sapien
SVELAHYDVLL

SEQ ID NO: 3793 - protein, 8 aa, Homo sapien
SVGCTGAV

SEQ ID NO: 3794 - protein, 10 aa, Homo sapien
SVGCTGAVPL

SEQ ID NO: 3795 - protein, 11 aa, Homo sapien
SVGCTGAVPLI

SEQ ID NO: 3796 - protein, 10 aa, Homo sapien
SVHNFTLPSW

SEQ ID NO: 3797 - protein, 11 aa, Homo sapien
SVHNFTLPSWA

SEQ ID NO: 3798 - protein, 10 aa, Homo sapien
SVILLGRHSL

SEQ ID NO: 3799 - protein, 11 aa, Homo sapien
SVILLGRHSLF

SEQ ID NO: 3800 - protein, 9 aa, Homo sapien
SVLAKELKF

SEQ ID NO: 3801 - protein, 10 aa, Homo sapien
SVLAKELKFV

SEQ ID NO: 3802 - protein, 8 aa, Homo sapien
SVSFDSLF

SEQ ID NO: 3803 - protein, 10 aa, Homo sapien
SVSFDSLFSA

SEQ ID NO: 3804 - protein, 11 aa, Homo sapien
SVSFDSLFSAV

SEQ ID NO: 3805 - protein, 8 aa, Homo sapien
SVTWIGAA

SEQ ID NO: 3806 - protein, 10 aa, Homo sapien
SVTWIGAAPL

SEQ ID NO: 3807 - protein, 11 aa, Homo sapien
SVTWIGAAPLI

SEQ ID NO: 3808 - protein, 8 aa, Homo sapien
SVYETYEL

SEQ ID NO: 3809 - protein, 9 aa, Homo sapien
SVYETYELV

SEQ ID NO: 3810 - protein, 9 aa, Homo sapien
TILFASWDA

SEQ ID NO: 3811 - protein, 8 aa, Homo sapien
TLGKLSGL

SEQ ID NO: 3812 - protein, 11 aa, Homo sapien
TLKSEEFQKRL

SEQ ID NO: 3813 - protein, 9 aa, Homo sapien
TLMSAMTNL

SEQ ID NO: 3814 - protein, 10 aa, Homo sapien
TLMSAMTNLA

SEQ ID NO: 3815 - protein, 11 aa, Homo sapien
TLMSAMTNLAA

SEQ ID NO: 3816 - protein, 11 aa, Homo sapien
TLPSWATEDTM

SEQ ID NO: 3817 - protein, 11 aa, Homo sapien
TLRGAVEPDRY

SEQ ID NO: 3818 - protein, 9 aa, Homo sapien
TLRVDCTPL

SEQ ID NO: 3819 - protein, 10 aa, Homo sapien
TLRVDCTPLM

SEQ ID NO: 3820 - protein, 11 aa, Homo sapien
TLRVDCTPLMY

SEQ ID NO: 3821 - protein, 9 aa, Homo sapien
TLSVTWIGA

SEQ ID NO: 3822 - protein, 10 aa, Homo sapien
TLSVTWIGAA

SEQ ID NO: 3823 - protein, 8 aa, Homo sapien
TMTKLREL

SEQ ID NO: 3824 - protein, 11 aa, Homo sapien
TMTKLRELSEL

SEQ ID NO: 3825 - protein, 9 aa, Homo sapien
TPGYPANEY

SEQ ID NO: 3826 - protein, 10 aa, Homo sapien
TPGYPANEYA

SEQ ID NO: 3827 - protein, 11 aa, Homo sapien
TPGYPANEYAY

SEQ ID NO: 3828 - protein, 8 aa, Homo sapien
TPKHNMKA

SEQ ID NO: 3829 - protein, 9 aa, Homo sapien
TPKHNMKAF

SEQ ID NO: 3830 - protein, 10 aa, Homo sapien
TPKHNMKAFL

SEQ ID NO: 3831 - protein, 8 aa, Homo sapien
TPKKLQCV

SEQ ID NO: 3832 - protein, 10 aa, Homo sapien
TPKKLQCVDL

SEQ ID NO: 3833 - protein, 8 aa, Homo sapien
TPLMYSLV

SEQ ID NO: 3834 - protein, 11 aa, Homo sapien
TPLMYSLVHNL

SEQ ID NO: 3835 - protein, 11 aa, Homo sapien
TQEPALGTTCY

SEQ ID NO: 3836 - protein, 11 aa, Homo sapien
TQEPALGTTCY

SEQ ID NO: 3837 - protein, 8 aa, Homo sapien
TQHEPYPL

SEQ ID NO: 3838 - protein, 9 aa, Homo sapien
TQHEPYPLM

SEQ ID NO: 3839 - protein, 10 aa, Homo sapien
TQHEPYPLML

SEQ ID NO: 3840 - protein, 9 aa, Homo sapien
TQIPSYKKL

SEQ ID NO: 3841 - protein, 10 aa, Homo sapien
TQIPSYKKLI

SEQ ID NO: 3842 - protein, 11 aa, Homo sapien
TQIPSYKKLIM

SEQ ID NO: 3843 - protein, 8 aa, Homo sapien
TQKVKMHI

SEQ ID NO: 3844 - protein, 9 aa, Homo sapien
TQLGMEQHY

SEQ ID NO: 3845 - protein, 11 aa, Homo sapien
TQLGMEQHYEL

SEQ ID NO: 3846 - protein, 9 aa, Homo sapien
TVAQVRGGM

SEQ ID NO: 3847 - protein, 10 aa, Homo sapien
TVAQVRGGMV

SEQ ID NO: 3848 - protein, 11 aa, Homo sapien
TVAQVRGGMVF

SEQ ID NO: 3849 - protein, 9 aa, Homo sapien
TVPLSEDQL

SEQ ID NO: 3850 - protein, 10 aa, Homo sapien
TVPLSEDQLL

SEQ ID NO: 3851 - protein, 11 aa, Homo sapien
TVPLSEDQLLY

SEQ ID NO: 3852 - protein, 9 aa, Homo sapien
TVQAAAETL

SEQ ID NO: 3853 - protein, 8 aa, Homo sapien
TVSGLQMA

SEQ ID NO: 3854 - protein, 9 aa, Homo sapien
TVSGLQMAL

SEQ ID NO: 3855 - protein, 11 aa, Homo sapien
TVSGLQMALDV

SEQ ID NO: 3856 - protein, 8 aa, Homo sapien
VIARYGKV

SEQ ID NO: 3857 - protein, 9 aa, Homo sapien
VIARYGKVF

SEQ ID NO: 3858 - protein, 8 aa, Homo sapien
VIGTLRGA

SEQ ID NO: 3859 - protein, 9 aa, Homo sapien
VIGTLRGAV

SEQ ID NO: 3860 - protein, 10 aa, Homo sapien
VILGGHRDSW

SEQ ID NO: 3861 - protein, 11 aa, Homo sapien
VILGGHRDSWV

SEQ ID NO: 3862 - protein, 9 aa, Homo sapien
VILLGRHSL

SEQ ID NO: 3863 - protein, 10 aa, Homo sapien
VILLGRHSLF

SEQ ID NO: 3864 - protein, 8 aa, Homo sapien
VILYSDPA

SEQ ID NO: 3865 - protein, 10 aa, Homo sapien
VILYSDPADY

SEQ ID NO: 3866 - protein, 11 aa, Homo sapien
VILYSDPADYF

SEQ ID NO: 3867 - protein, 11 aa, Homo sapien
VIPQDWSTECM

SEQ ID NO: 3868 - protein, 8 aa, Homo sapien
VISNDVCA

SEQ ID NO: 3869 - protein, 10 aa, Homo sapien
VISNDVCAQV

SEQ ID NO: 3870 - protein, 11 aa, Homo sapien
VIYAPSSHNKY

SEQ ID NO: 3871 - protein, 8 aa, Homo sapien
VLAGGFFL

SEQ ID NO: 3872 - protein, 9 aa, Homo sapien
VLAGGFFLL

SEQ ID NO: 3873 - protein, 11 aa, Homo sapien
VLAGGFFLLGF

SEQ ID NO: 3874 - protein, 8 aa, Homo sapien
VLAKELKF

SEQ ID NO: 3875 - protein, 9 aa, Homo sapien
VLAKELKFV

SEQ ID NO: 3876 - protein, 11 aa, Homo sapien
VLAKELKFVTL

SEQ ID NO: 3877 - protein, 10 aa, Homo sapien
VLGLPTQEPA

SEQ ID NO: 3878 - protein, 11 aa, Homo sapien
VLGLPTQEPAL

SEQ ID NO: 3879 - protein, 9 aa, Homo sapien
VLPFDCRDY

SEQ ID NO: 3880 - protein, 10 aa, Homo sapien
VLPFDCRDYA

SEQ ID NO: 3881 - protein, 11 aa, Homo sapien
VLPFDCRDYAV

SEQ ID NO: 3882 - protein, 8 aa, Homo sapien
VLQGITSW

SEQ ID NO: 3883 - protein, 8 aa, Homo sapien
VLQGITSW

SEQ ID NO: 3884 - protein, 9 aa, Homo sapien
VLRKYADKI

SEQ ID NO: 3885 - protein, 10 aa, Homo sapien
VLRKYADKIY

SEQ ID NO: 3886 - protein, 9 aa, Homo sapien
VLRMMNDQL

SEQ ID NO: 3887 - protein, 10 aa, Homo sapien
VLRMMNDQLM

SEQ ID NO: 3888 - protein, 11 aa, Homo sapien
VLRMMNDQLMF

SEQ ID NO: 3889 - protein, 8 aa, Homo sapien
VLSIALSV

SEQ ID NO: 3890 - protein, 8 aa, Homo sapien
VLTAAHCI

SEQ ID NO: 3891 - protein, 8 aa, Homo sapien
VLTAAHCL

SEQ ID NO: 3892 - protein, 9 aa, Homo sapien
VLVASRGRA

SEQ ID NO: 3893 - protein, 10 aa, Homo sapien
VLVASRGRAV

SEQ ID NO: 3894 - protein, 8 aa, Homo sapien
VLVHPQWV

SEQ ID NO: 3895 - protein, 8 aa, Homo sapien
VLVHPQWV

SEQ ID NO: 3896 - protein, 9 aa, Homo sapien
VLVHPQWVL

SEQ ID NO: 3897 - protein, 9 aa, Homo sapien
VLVHPQWVL

SEQ ID NO: 3898 - protein, 11 aa, Homo sapien
VLVHPQWVLTA

SEQ ID NO: 3899 - protein, 11 aa, Homo sapien
VLVHPQWVLTA

SEQ ID NO: 3900 - protein, 10 aa, Homo sapien
VLVNEILNHM

SEQ ID NO: 3901 - protein, 10 aa, Homo sapien
VMDLPTQEPA

SEQ ID NO: 3902 - protein, 11 aa, Homo sapien
VMDLPTQEPAL

SEQ ID NO: 3903 - protein, 8 aa, Homo sapien
VPLIQSRI

SEQ ID NO: 3904 - protein, 9 aa, Homo sapien
VPLIQSRIV

SEQ ID NO: 3905 - protein, 8 aa, Homo sapien
VPLSEDQL

SEQ ID NO: 3906 - protein, 9 aa, Homo sapien
VPLSEDQLL

SEQ ID NO: 3907 - protein, 10 aa, Homo sapien
VPLSEDQLLY

SEQ ID NO: 3908 - protein, 11 aa, Homo sapien
VPLSEDQLLYL

SEQ ID NO: 3909 - protein, 11 aa, Homo sapien
VPVSHSFPHPL

SEQ ID NO: 3910 - protein, 9 aa, Homo sapien
VPYNVGPGF

SEQ ID NO: 3911 - protein, 8 aa, Homo sapien
VQAAAETL

SEQ ID NO: 3912 - protein, 11 aa, Homo sapien
VQAAAETLSEV

SEQ ID NO: 3913 - protein, 9 aa, Homo sapien
VQRGNILNL

SEQ ID NO: 3914 - protein, 8 aa, Homo sapien
VVFLTLSV

SEQ ID NO: 3915 - protein, 10 aa, Homo sapien
VVFLTLSVTW

SEQ ID NO: 3916 - protein, 11 aa, Homo sapien
VVFLTLSVTWI

SEQ ID NO: 3917 - protein, 9 aa, Homo sapien
VVHEIVRSF

SEQ ID NO: 3918 - protein, 8 aa, Homo sapien
VVHYRKWI

SEQ ID NO: 3919 - protein, 8 aa, Homo sapien
VVHYRKWI

SEQ ID NO: 3920 - protein, 10 aa, Homo sapien
VVLRKYADKI

SEQ ID NO: 3921 - protein, 11 aa, Homo sapien
VVLRKYADKIY

SEQ ID NO: 3922 - protein, 8 aa, Homo sapien
WIGAAPLI

SEQ ID NO: 3923 - protein, 9 aa, Homo sapien
WIGAAPLIL

SEQ ID NO: 3924 - protein, 8 aa, Homo sapien
WIKDTIAA

SEQ ID NO: 3925 - protein, 8 aa, Homo sapien
WIKDTIVA

SEQ ID NO: 3926 - protein, 8 aa, Homo sapien
WLCAGALV

SEQ ID NO: 3927 - protein, 9 aa, Homo sapien
WLCAGALVL

SEQ ID NO: 3928 - protein, 10 aa, Homo sapien
WLCAGALVLA

SEQ ID NO: 3929 - protein, 8 aa, Homo sapien
WLDRSVLA

SEQ ID NO: 3930 - protein, 11 aa, Homo sapien
WLDRSVLAKEL

SEQ ID NO: 3931 - protein, 8 aa, Homo sapien
WLGRHNLF

SEQ ID NO: 3932 - protein, 8 aa, Homo sapien
WPQGFGQL

SEQ ID NO: 3933 - protein, 11 aa, Homo sapien
WPQGFGQLTQL

SEQ ID NO: 3934 - protein, 9 aa, Homo sapien
WQPIPVHTV

SEQ ID NO: 3935 - protein, 11 aa, Homo sapien
WQPIPVHTVPL

SEQ ID NO: 3936 - protein, 10 aa, Homo sapien
WQVAVYSHGW

SEQ ID NO: 3937 - protein, 11 aa, Homo sapien
WQVAVYSHGWA

SEQ ID NO: 3938 - protein, 11 aa, Homo sapien
WQVLVASRGRA

SEQ ID NO: 3939 - protein, 9 aa, Homo sapien
WVLTAAHCI

SEQ ID NO: 3940 - protein, 9 aa, Homo sapien
WVLTAAHCL

SEQ ID NO: 3941 - protein, 8 aa, Homo sapien
YINADSSI

SEQ ID NO: 3942 - protein, 9 aa, Homo sapien
YIRKRYRKF

SEQ ID NO: 3943 - protein, 10 aa, Homo sapien
YIRKRYRKFL

SEQ ID NO: 3944 - protein, 11 aa, Homo sapien
YIRSTDVDRTL

SEQ ID NO: 3945 - protein, 10 aa, Homo sapien
YLPFRNCPRF

SEQ ID NO: 3946 - protein, 8 aa, Homo sapien
YPANEYAY

SEQ ID NO: 3947 - protein, 8 aa, Homo sapien
YPLYHSVY

SEQ ID NO: 3948 - protein, 11 aa, Homo sapien
YPLYHSVYETY

SEQ ID NO: 3949 - protein, 9 aa, Homo sapien
YPNKTHPNY

SEQ ID NO: 3950 - protein, 10 aa, Homo sapien
YPNKTHPNYI

SEQ ID NO: 3951 - protein, 9 aa, Homo sapien
YVAAFTVQA

SEQ ID NO: 3952 - protein, 10 aa, Homo sapien
YVAAFTVQAA

SEQ ID NO: 3953 - protein, 11 aa, Homo sapien
YVAAFTVQAAA

SEQ ID NO: 3954 - protein, 11 aa, Homo sapien
YVILGGHRDSW

SEQ ID NO: 3955 - protein, 10 aa, Homo sapien
YVNYARTEDF

SEQ ID NO: 3956 - protein, 11 aa, Homo sapien
YVNYARTEDFF

SEQ ID NO: 3957 - protein, 9 aa, Homo sapien
ADSSIEGNY

SEQ ID NO: 3958 - protein, 9 aa, Homo sapien
AGAKGVILY

SEQ ID NO: 3959 - protein, 9 aa, Homo sapien
AGDPLTPGY

SEQ ID NO: 3960 - protein, 9 aa, Homo sapien
AGESFPGIY

SEQ ID NO: 3961 - protein, 8 aa, Homo sapien
APSSHNKY

SEQ ID NO: 3962 - protein, 9 aa, Homo sapien
ASCHLTELY

SEQ ID NO: 3963 - protein, 11 aa, Homo sapien
CRDYAVVLRKY

SEQ ID NO: 3964 - protein, 10 aa, Homo sapien
CSGKIVIARY

SEQ ID NO: 3965 - protein, 8 aa, Homo sapien
DSSIEGNY

SEQ ID NO: 3966 - protein, 8 aa, Homo sapien
DSVELAHY

SEQ ID NO: 3967 - protein, 9 aa, Homo sapien
DYAVVLRKY

SEQ ID NO: 3968 - protein, 9 aa, Homo sapien
EGDLVYVNY

SEQ ID NO: 3969 - protein, 11 aa, Homo sapien
ELAHYDVLLSY

SEQ ID NO: 3970 - protein, 11 aa, Homo sapien
ELSELSLLSLY

SEQ ID NO: 3971 - protein, 8 aa, Homo sapien
ELSLLSLY

SEQ ID NO: 3972 - protein, 9 aa, Homo sapien
EPALGTTCY

SEQ ID NO: 3973 - protein, 9 aa, Homo sapien
EPALGTTCY

SEQ ID NO: 3974 - protein, 9 aa, Homo sapien
ESYKHEQVY

SEQ ID NO: 3975 - protein, 8 aa, Homo sapien
ETNKFSGY

SEQ ID NO: 3976 - protein, 11 aa, Homo sapien
ETNKFSGYPLY

SEQ ID NO: 3977 - protein, 10 aa, Homo sapien
ETYELVEKFY

SEQ ID NO: 3978 - protein, 11 aa, Homo sapien
FSGYPLYHSVY

SEQ ID NO: 3979 - protein, 8 aa, Homo sapien
FYDPMFKY

SEQ ID NO: 3980 - protein, 8 aa, Homo sapien
GESFPGIY

SEQ ID NO: 3981 - protein, 8 aa, Homo sapien
GFEGKSLY

SEQ ID NO: 3982 - protein, 9 aa, Homo sapien
GIASGRARY

SEQ ID NO: 3983 - protein, 10 aa, Homo sapien
GLDSVELAHY

SEQ ID NO: 3984 - protein, 11 aa, Homo sapien
GMEQHYELGEY

SEQ ID NO: 3985 - protein, 9 aa, Homo sapien
GMPEGDLVY

SEQ ID NO: 3986 - protein, 11 aa, Homo sapien
HMKRATQIPSY

SEQ ID NO: 3987 - protein, 8 aa, Homo sapien
HSFPHPLY

SEQ ID NO: 3988 - protein, 8 aa, Homo sapien
HSFPHPLY

SEQ ID NO: 3989 - protein, 10 aa, Homo sapien
HSQPWQVAVY

SEQ ID NO: 3990 - protein, 10 aa, Homo sapien
HSTNEVTRIY

SEQ ID NO: 3991 - protein, 8 aa, Homo sapien
HYDVLLSY

SEQ ID NO: 3992 - protein, 8 aa, Homo sapien
IASGRARY

SEQ ID NO: 3993 - protein, 11 aa, Homo sapien
IHSTNEVTRIY

SEQ ID NO: 3994 - protein, 11 aa, Homo sapien
INADSSIEGNY

SEQ ID NO: 3995 - protein, 10 aa, Homo sapien
IPSYKKLIMY

SEQ ID NO: 3996 - protein, 10 aa, Homo sapien
IWSKVYDPLY

SEQ ID NO: 3997 - protein, 10 aa, Homo sapien
IYAPSSHNKY

SEQ ID NO: 3998 - protein, 10 aa, Homo sapien
KAENIKKFLY

SEQ ID NO: 3999 - protein, 8 aa, Homo sapien
KFSGYPLY

SEQ ID NO: 4000 - protein, 9 aa, Homo sapien
KGEYFVEMY

SEQ ID NO: 4001 - protein, 10 aa, Homo sapien
KGEYFVEMYY

SEQ ID NO: 4002 - protein, 11 aa, Homo sapien
KHSQPWQVAVY

SEQ ID NO: 4003 - protein, 11 aa, Homo sapien
KPAVYTKVVHY

SEQ ID NO: 4004 - protein, 9 aa, Homo sapien
KRATQIPSY

SEQ ID NO: 4005 - protein, 11 aa, Homo sapien
KYAGESFPGIY

SEQ ID NO: 4006 - protein, 9 aa, Homo sapien
LDSVELAHY

SEQ ID NO: 4007 - protein, 9 aa, Homo sapien
LFEPPPPGY

SEQ ID NO: 4008 - protein, 9 aa, Homo sapien
LGEYIRKRY

SEQ ID NO: 4009 - protein, 11 aa, Homo sapien
LKAENIKKFLY

SEQ ID NO: 4010 - protein, 11 aa, Homo sapien
LLSNDMCARAY

SEQ ID NO: 4011 - protein, 11 aa, Homo sapien
LNESYKHEQVY

SEQ ID NO: 4012 - protein, 8 aa, Homo sapien
LPEKPAVY

SEQ ID NO: 4013 - protein, 8 aa, Homo sapien
LPERPSLY

SEQ ID NO: 4014 - protein, 11 aa, Homo sapien
LPSIPVHPIGY

SEQ ID NO: 4015 - protein, 8 aa, Homo sapien
LQERGVAY

SEQ ID NO: 4016 - protein, 8 aa, Homo sapien
LSEDQLLY

SEQ ID NO: 4017 - protein, 10 aa, Homo sapien
LSELSLLSLY

SEQ ID NO: 4018 - protein, 10 aa, Homo sapien
LSNDMCARAY

SEQ ID NO: 4019 - protein, 11 aa, Homo sapien
LSYPNKTHPNY

SEQ ID NO: 4020 - protein, 11 aa, Homo sapien
LTELYFEKGEY

SEQ ID NO: 4021 - protein, 10 aa, Homo sapien
LTPGYPANEY

SEQ ID NO: 4022 - protein, 10 aa, Homo sapien
LTQLGMEQHY

SEQ ID NO: 4023 - protein, 8 aa, Homo sapien
LYSDPADY

SEQ ID NO: 4024 - protein, 8 aa, Homo sapien
MPEGDLVY

SEQ ID NO: 4025 - protein, 11 aa, Homo sapien
MPEGDLVYVNY

SEQ ID NO: 4026 - protein, 10 aa, Homo sapien
NADSSIEGNY

SEQ ID NO: 4027 - protein, 11 aa, Homo sapien
NCSGKIVIARY

SEQ ID NO: 4028 - protein, 10 aa, Homo sapien
NESYKHEQVY

SEQ ID NO: 4029 - protein, 11 aa, Homo sapien
NGAGDPLTPGY

SEQ ID NO: 4030 - protein, 10 aa, Homo sapien
NWETNKFSGY

SEQ ID NO: 4031 - protein, 11 aa, Homo sapien
PCALPEKPAVY

SEQ ID NO: 4032 - protein, 11 aa, Homo sapien
PCALPERPSLY

SEQ ID NO: 4033 - protein, 11 aa, Homo sapien
PDEGFEGKSLY

SEQ ID NO: 4034 - protein, 9 aa, Homo sapien
PLSEDQLLY

SEQ ID NO: 4035 - protein, 10 aa, Homo sapien
PSIPVHPIGY

SEQ ID NO: 4036 - protein, 11 aa, Homo sapien
PSIPVHPIGYY

SEQ ID NO: 4037 - protein, 10 aa, Homo sapien
PSLYTKVVHY

SEQ ID NO: 4038 - protein, 9 aa, Homo sapien
PSYKKLIMY

SEQ ID NO: 4039 - protein, 11 aa, Homo sapien
PVSHSFPHPLY

SEQ ID NO: 4040 - protein, 11 aa, Homo sapien
PYASCHLTELY

SEQ ID NO: 4041 - protein, 11 aa, Homo sapien
QLAGAKGVILY

SEQ ID NO: 4042 - protein, 11 aa, Homo sapien
QVSHSFPHPLY

SEQ ID NO: 4043 - protein, 9 aa, Homo sapien
RGAVEPDRY

SEQ ID NO: 4044 - protein, 8 aa, Homo sapien
RGSLKVPY

SEQ ID NO: 4045 - protein, 9 aa, Homo sapien
RNETQHEPY

SEQ ID NO: 4046 - protein, 11 aa, Homo sapien
RPSLYTKVVHY

SEQ ID NO: 4047 - protein, 9 aa, Homo sapien
RVDCTPLMY

SEQ ID NO: 4048 - protein, 11 aa, Homo sapien
SEEFQKRLHPY

SEQ ID NO: 4049 - protein, 9 aa, Homo sapien
SHSFPHPLY

SEQ ID NO: 4050 - protein, 9 aa, Homo sapien
SHSFPHPLY

SEQ ID NO: 4051 - protein, 11 aa, Homo sapien
SMKHPQEMKTY

SEQ ID NO: 4052 - protein, 9 aa, Homo sapien
SNDMCARAY

SEQ ID NO: 4053 - protein, 11 aa, Homo sapien
SSWRGSLKVPY

SEQ ID NO: 4054 - protein, 9 aa, Homo sapien
STNEVTRIY

SEQ ID NO: 4055 - protein, 8 aa, Homo sapien
TNEVTRIY

SEQ ID NO: 4056 - protein, 11 aa, Homo sapien
TQEPALGTTCY

SEQ ID NO: 4057 - protein, 11 aa, Homo sapien
TQEPALGTTCY

SEQ ID NO: 4058 - protein, 11 aa, Homo sapien
TSLFEPPPPGY

SEQ ID NO: 4059 - protein, 9 aa, Homo sapien
TYELVEKFY

SEQ ID NO: 4060 - protein, 11 aa, Homo sapien
VSGLQMALDVY

SEQ ID NO: 4061 - protein, 10 aa, Homo sapien
VSHSFPHPLY

SEQ ID NO: 4062 - protein, 10 aa, Homo sapien
VSHSFPHPLY

SEQ ID NO: 4063 - protein, 9 aa, Homo sapien
WGEVKRQIY

SEQ ID NO: 4064 - protein, 9 aa, Homo sapien
WSKVYDPLY

SEQ ID NO: 4065 - protein, 10 aa, Homo sapien
YASCHLTELY

SEQ ID NO: 4066 - protein, 9 aa, Homo sapien
YFAPGVKSY

SEQ ID NO: 4067 - protein, 8 aa, Homo sapien
YHSVYETY

SEQ ID NO: 4068 - protein, 8 aa, Homo sapien
YPANEYAY

SEQ ID NO: 4069 - protein, 10 aa, Homo sapien
AAAETLSEVA

SEQ ID NO: 4070 - protein, 9 aa, Homo sapien
AAETLSEVA

SEQ ID NO: 4071 - protein, 8 aa, Homo sapien
AAFTVQAA

SEQ ID NO: 4072 - protein, 9 aa, Homo sapien
AAFTVQAAA

SEQ ID NO: 4073 - protein, 8 aa, Homo sapien
AAHCIRNK

SEQ ID NO: 4074 - protein, 8 aa, Homo sapien
AAPLILSR

SEQ ID NO: 4075 - protein, 8 aa, Homo sapien
AAPLLLAR

SEQ ID NO: 4076 - protein, 9 aa, Homo sapien
AAPLLLARA

SEQ ID NO: 4077 - protein, 10 aa, Homo sapien
AAPLLLARAA

SEQ ID NO: 4078 - protein, 8 aa, Homo sapien
AASLSLGF

SEQ ID NO: 4079 - protein, 10 aa, Homo sapien
AASLSLGFLF

SEQ ID NO: 4080 - protein, 9 aa, Homo sapien
AAVVHEIVR

SEQ ID NO: 4081 - protein, 11 aa, Homo sapien
AAVVHEIVRSF

SEQ ID NO: 4082 - protein, 10 aa, Homo sapien
ADKIYSISMK

SEQ ID NO: 4083 - protein, 11 aa, Homo sapien
ADKIYSISMKH

SEQ ID NO: 4084 - protein, 9 aa, Homo sapien
ADSSIEGNY

SEQ ID NO: 4085 - protein, 9 aa, Homo sapien
ADYFAPGVK

SEQ ID NO: 4086 - protein, 11 aa, Homo sapien
ADYFAPGVKSY

SEQ ID NO: 4087 - protein, 11 aa, Homo sapien
AFIDPLGLPDR

SEQ ID NO: 4088 - protein, 8 aa, Homo sapien
AFLDELKA

SEQ ID NO: 4089 - protein, 8 aa, Homo sapien
AFTVQAAA

SEQ ID NO: 4090 - protein, 9 aa, Homo sapien
AGAKGVILY

SEQ ID NO: 4091 - protein, 10 aa, Homo sapien
AGALVLAGGF

SEQ ID NO: 4092 - protein, 11 aa, Homo sapien
AGALVLAGGFF

SEQ ID NO: 4093 - protein, 9 aa, Homo sapien
AGDPLTPGY

SEQ ID NO: 4094 - protein, 11 aa, Homo sapien
AGDPLTPGYPA

SEQ ID NO: 4095 - protein, 9 aa, Homo sapien
AGESFPGIY

SEQ ID NO: 4096 - protein, 11 aa, Homo sapien
AGESFPGIYDA

SEQ ID NO: 4097 - protein, 9 aa, Homo sapien
AGGFFLLGF

SEQ ID NO: 4098 - protein, 11 aa, Homo sapien
AGGFFLLGFLF

SEQ ID NO: 4099 - protein, 8 aa, Homo sapien
AGLWTGGK

SEQ ID NO: 4100 - protein, 8 aa, Homo sapien
AGRWTGGK

SEQ ID NO: 4101 - protein, 10 aa, Homo sapien
AGTEQNFQLA

SEQ ID NO: 4102 - protein, 11 aa, Homo sapien
AGTEQNFQLAK

SEQ ID NO: 4103 - protein, 8 aa, Homo sapien
ALFDIESK

SEQ ID NO: 4104 - protein, 8 aa, Homo sapien
ALGTTCYA

SEQ ID NO: 4105 - protein, 8 aa, Homo sapien
ALGTTCYA

SEQ ID NO: 4106 - protein, 9 aa, Homo sapien
ALPEKPAVY

SEQ ID NO: 4107 - protein, 11 aa, Homo sapien
ALPEKPAVYTK

SEQ ID NO: 4108 - protein, 9 aa, Homo sapien
ALPERPSLY

SEQ ID NO: 4109 - protein, 11 aa, Homo sapien
ALPERPSLYTK

SEQ ID NO: 4110 - protein, 9 aa, Homo sapien
ALSVGCTGA

SEQ ID NO: 4111 - protein, 8 aa, Homo sapien
ALVLAGGF

SEQ ID NO: 4112 - protein, 9 aa, Homo sapien
ALVLAGGFF

SEQ ID NO: 4113 - protein, 9 aa, Homo sapien
AMTNLAALF

SEQ ID NO: 4114 - protein, 9 aa, Homo sapien
ASCHLTELY

SEQ ID NO: 4115 - protein, 10 aa, Homo sapien
ASCHLTELYF

SEQ ID NO: 4116 - protein, 9 aa, Homo sapien
ASGRARYTK

SEQ ID NO: 4117 - protein, 11 aa, Homo sapien
ASKFSERLQDF

SEQ ID NO: 4118 - protein, 9 aa, Homo sapien
ASLSLGFLF

SEQ ID NO: 4119 - protein, 8 aa, Homo sapien
ASWDAEEF

SEQ ID NO: 4120 - protein, 11 aa, Homo sapien
ATARRPRWLCA

SEQ ID NO: 4121 - protein, 8 aa, Homo sapien
ATEDTMTK

SEQ ID NO: 4122 - protein, 10 aa, Homo sapien
ATEDTMTKLR

SEQ ID NO: 4123 - protein, 10 aa, Homo sapien
ATLGKLSGLH

SEQ ID NO: 4124 - protein, 8 aa, Homo sapien
ATNITPKH

SEQ ID NO: 4125 - protein, 11 aa, Homo sapien
ATNITPKHNMK

SEQ ID NO: 4126 - protein, 8 aa, Homo sapien
ATQIPSYK

SEQ ID NO: 4127 - protein, 9 aa, Homo sapien
ATQIPSYKK

SEQ ID NO: 4128 - protein, 9 aa, Homo sapien
AVATARRPR

SEQ ID NO: 4129 - protein, 9 aa, Homo sapien
AVCGGVLVH

SEQ ID NO: 4130 - protein, 10 aa, Homo sapien
AVGLPSIPVH

SEQ ID NO: 4131 - protein, 9 aa, Homo sapien
AVKNFTEIA

SEQ ID NO: 4132 - protein, 11 aa, Homo sapien
AVKNFTEIASK

SEQ ID NO: 4133 - protein, 8 aa, Homo sapien
AVPLIQSR

SEQ ID NO: 4134 - protein, 8 aa, Homo sapien
AVVHEIVR

SEQ ID NO: 4135 - protein, 10 aa, Homo sapien
AVVHEIVRSF

SEQ ID NO: 4136 - protein, 8 aa, Homo sapien
AVVLRKYA

SEQ ID NO: 4137 - protein, 10 aa, Homo sapien
AVVLRKYADK

SEQ ID NO: 4138 - protein, 8 aa, Homo sapien
AVYSHGWA

SEQ ID NO: 4139 - protein, 9 aa, Homo sapien
AVYSHGWAH

SEQ ID NO: 4140 - protein, 8 aa, Homo sapien
AVYTKVVH

SEQ ID NO: 4141 - protein, 9 aa, Homo sapien
AVYTKVVHY

SEQ ID NO: 4142 - protein, 10 aa, Homo sapien
AVYTKVVHYR

SEQ ID NO: 4143 - protein, 11 aa, Homo sapien
AVYTKVVHYRK

SEQ ID NO: 4144 - protein, 8 aa, Homo sapien
CAGALVLA

SEQ ID NO: 4145 - protein, 11 aa, Homo sapien
CAGALVLAGGF

SEQ ID NO: 4146 - protein, 9 aa, Homo sapien
CAGLWTGGK

SEQ ID NO: 4147 - protein, 9 aa, Homo sapien
CAGRWTGGK

SEQ ID NO: 4148 - protein, 8 aa, Homo sapien
CALPEKPA

SEQ ID NO: 4149 - protein, 10 aa, Homo sapien
CALPEKPAVY

SEQ ID NO: 4150 - protein, 10 aa, Homo sapien
CALPERPSLY

SEQ ID NO: 4151 - protein, 8 aa, Homo sapien
CAQVHPQK

SEQ ID NO: 4152 - protein, 11 aa, Homo sapien
CAQVHPQKVTK

SEQ ID NO: 4153 - protein, 8 aa, Homo sapien
CARAYSEK

SEQ ID NO: 4154 - protein, 8 aa, Homo sapien
CSGKIVIA

SEQ ID NO: 4155 - protein, 9 aa, Homo sapien
CSGKIVIAR

SEQ ID NO: 4156 - protein, 10 aa, Homo sapien
CSGKIVIARY

SEQ ID NO: 4157 - protein, 9 aa, Homo sapien
CSPSCPLER

SEQ ID NO: 4158 - protein, 10 aa, Homo sapien
CSPSCPLERF

SEQ ID NO: 4159 - protein, 11 aa, Homo sapien
CSPSCPLERFA

SEQ ID NO: 4160 - protein, 11 aa, Homo sapien
CTGAVPLIQSR

SEQ ID NO: 4161 - protein, 10 aa, Homo sapien
CTPLMYSLVH

SEQ ID NO: 4162 - protein, 9 aa, Homo sapien
DALFDIESK

SEQ ID NO: 4163 - protein, 8 aa, Homo sapien
DAQKLLEK

SEQ ID NO: 4164 - protein, 10 aa, Homo sapien
DCRDYAVVLR

SEQ ID NO: 4165 - protein, 11 aa, Homo sapien
DCRDYAVVLRK

SEQ ID NO: 4166 - protein, 11 aa, Homo sapien
DCTPLMYSLVH

SEQ ID NO: 4167 - protein, 11 aa, Homo sapien
DDSSHDLMLLR

SEQ ID NO: 4168 - protein, 11 aa, Homo sapien
DFDKSNPIVLR

SEQ ID NO: 4169 - protein, 8 aa, Homo sapien
DFEVFFQR

SEQ ID NO: 4170 - protein, 10 aa, Homo sapien
DFFKLERDMK

SEQ ID NO: 4171 - protein, 8 aa, Homo sapien
DFIATLGK

SEQ ID NO: 4172 - protein, 11 aa, Homo sapien
DGNEIFNTSLF

SEQ ID NO: 4173 - protein, 10 aa, Homo sapien
DIESKVDPSK

SEQ ID NO: 4174 - protein, 11 aa, Homo sapien
DIESKVDPSKA

SEQ ID NO: 4175 - protein, 8 aa, Homo sapien
DIVPPFSA

SEQ ID NO: 4176 - protein, 9 aa, Homo sapien
DIVPPFSAF

SEQ ID NO: 4177 - protein, 8 aa, Homo sapien
DLFGIWSK

SEQ ID NO: 4178 - protein, 10 aa, Homo sapien
DLFGIWSKVY

SEQ ID NO: 4179 - protein, 11 aa, Homo sapien
DLHVISNDVCA

SEQ ID NO: 4180 - protein, 11 aa, Homo sapien
DLMLLRLSEPA

SEQ ID NO: 4181 - protein, 11 aa, Homo sapien
DLMLLRLSEPA

SEQ ID NO: 4182 - protein, 8 aa, Homo sapien
DLPTQEPA

SEQ ID NO: 4183 - protein, 8 aa, Homo sapien
DLVYVNYA

SEQ ID NO: 4184 - protein, 9 aa, Homo sapien
DLVYVNYAR

SEQ ID NO: 4185 - protein, 10 aa, Homo sapien
DMCARAYSEK

SEQ ID NO: 4186 - protein, 9 aa, Homo sapien
DMKINCSGK

SEQ ID NO: 4187 - protein, 8 aa, Homo sapien
DMSLLKNR

SEQ ID NO: 4188 - protein, 9 aa, Homo sapien
DMSLLKNRF

SEQ ID NO: 4189 - protein, 11 aa, Homo sapien
DMSLLKNRFLR

SEQ ID NO: 4190 - protein, 8 aa, Homo sapien
DSAVATAR

SEQ ID NO: 4191 - protein, 9 aa, Homo sapien
DSAVATARR

SEQ ID NO: 4192 - protein, 11 aa, Homo sapien
DSAVATARRPR

SEQ ID NO: 4193 - protein, 8 aa, Homo sapien
DSLFSAVK

SEQ ID NO: 4194 - protein, 10 aa, Homo sapien
DSLFSAVKNF

SEQ ID NO: 4195 - protein, 10 aa, Homo sapien
DSSHDLMLLR

SEQ ID NO: 4196 - protein, 10 aa, Homo sapien
DSSHDLMLLR

SEQ ID NO: 4197 - protein, 8 aa, Homo sapien
DSSIEGNY

SEQ ID NO: 4198 - protein, 11 aa, Homo sapien
DSSIEGNYTLR

SEQ ID NO: 4199 - protein, 9 aa, Homo sapien
DSSWRGSLK

SEQ ID NO: 4200 - protein, 8 aa, Homo sapien
DSVELAHY

SEQ ID NO: 4201 - protein, 9 aa, Homo sapien
DTFPTDPIK

SEQ ID NO: 4202 - protein, 10 aa, Homo sapien
DTGQRVPVSH

SEQ ID NO: 4203 - protein, 10 aa, Homo sapien
DTGQVFQVSH

SEQ ID NO: 4204 - protein, 10 aa, Homo sapien
DTTVSGLQMA

SEQ ID NO: 4205 - protein, 10 aa, Homo sapien
DVCAQVHPQK

SEQ ID NO: 4206 - protein, 9 aa, Homo sapien
DVDRTLMSA

SEQ ID NO: 4207 - protein, 9 aa, Homo sapien
DVLLSYPNK

SEQ ID NO: 4208 - protein, 11 aa, Homo sapien
DVLLSYPNKTH

SEQ ID NO: 4209 - protein, 10 aa, Homo sapien
DVYNGLLPPY

SEQ ID NO: 4210 - protein, 11 aa, Homo sapien
DVYNGLLPPYA

SEQ ID NO: 4211 - protein, 8 aa, Homo sapien
EATNITPK

SEQ ID NO: 4212 - protein, 9 aa, Homo sapien
EATNITPKH

SEQ ID NO: 4213 - protein, 11 aa, Homo sapien
EAVGLPSIPVH

SEQ ID NO: 4214 - protein, 8 aa, Homo sapien
ECMTTNSH

SEQ ID NO: 4215 - protein, 8 aa, Homo sapien
EDFFKLER

SEQ ID NO: 4216 - protein, 11 aa, Homo sapien
EDFFKLERDMK

SEQ ID NO: 4217 - protein, 9 aa, Homo sapien
EDQLLYLPF

SEQ ID NO: 4218 - protein, 10 aa, Homo sapien
EDQLLYLPFR

SEQ ID NO: 4219 - protein, 11 aa, Homo sapien
EDSSHDLMLLR

SEQ ID NO: 4220 - protein, 11 aa, Homo sapien
EDTGQRVPVSH

SEQ ID NO: 4221 - protein, 11 aa, Homo sapien
EDTGQVFQVSH

SEQ ID NO: 4222 - protein, 8 aa, Homo sapien
EDTMTKLR

SEQ ID NO: 4223 - protein, 10 aa, Homo sapien
EFGLDSVELA

SEQ ID NO: 4224 - protein, 11 aa, Homo sapien
EFGLDSVELAH

SEQ ID NO: 4225 - protein, 11 aa, Homo sapien
EFGLLGSTEWA

SEQ ID NO: 4226 - protein, 9 aa, Homo sapien
EFQKRLHPY

SEQ ID NO: 4227 - protein, 10 aa, Homo sapien
EFQKRLHPYK

SEQ ID NO: 4228 - protein, 10 aa, Homo sapien
EFSGMPRISK

SEQ ID NO: 4229 - protein, 9 aa, Homo sapien
EGDLVYVNY

SEQ ID NO: 4230 - protein, 10 aa, Homo sapien
EGDLVYVNYA

SEQ ID NO: 4231 - protein, 11 aa, Homo sapien
EGDLVYVNYAR

SEQ ID NO: 4232 - protein, 9 aa, Homo sapien
EGFEGKSLY

SEQ ID NO: 4233 - protein, 11 aa, Homo sapien
EGKSLYESWTK

SEQ ID NO: 4234 - protein, 11 aa, Homo sapien
EGWRPRRTILF

SEQ ID NO: 4235 - protein, 9 aa, Homo sapien
EIASKFSER

SEQ ID NO: 4236 - protein, 8 aa, Homo sapien
EIFNTSLF

SEQ ID NO: 4237 - protein, 8 aa, Homo sapien
EILNHMKR

SEQ ID NO: 4238 - protein, 9 aa, Homo sapien
EILNHMKRA

SEQ ID NO: 4239 - protein, 10 aa, Homo sapien
EIVRSFGTLK

SEQ ID NO: 4240 - protein, 11 aa, Homo sapien
EIVRSFGTLKK

SEQ ID NO: 4241 - protein, 11 aa, Homo sapien
ELAHYDVLLSY

SEQ ID NO: 4242 - protein, 10 aa, Homo sapien
ELANSIVLPF

SEQ ID NO: 4243 - protein, 8 aa, Homo sapien
ELESETLK

SEQ ID NO: 4244 - protein, 8 aa, Homo sapien
ELGEYIRK

SEQ ID NO: 4245 - protein, 9 aa, Homo sapien
ELGEYIRKR

SEQ ID NO: 4246 - protein, 10 aa, Homo sapien
ELGEYIRKRY

SEQ ID NO: 4247 - protein, 11 aa, Homo sapien
ELGEYIRKRYR

SEQ ID NO: 4248 - protein, 8 aa, Homo sapien
ELKAENIK

SEQ ID NO: 4249 - protein, 9 aa, Homo sapien
ELKAENIKK

SEQ ID NO: 4250 - protein, 10 aa, Homo sapien
ELKAENIKKF

SEQ ID NO: 4251 - protein, 9 aa, Homo sapien
ELKFVTLVF

SEQ ID NO: 4252 - protein, 10 aa, Homo sapien
ELKFVTLVFR

SEQ ID NO: 4253 - protein, 11 aa, Homo sapien
ELKFVTLVFRH

SEQ ID NO: 4254 - protein, 9 aa, Homo sapien
ELKSPDEGF

SEQ ID NO: 4255 - protein, 11 aa, Homo sapien
ELSELSLLSLY

SEQ ID NO: 4256 - protein, 8 aa, Homo sapien
ELSLLSLY

SEQ ID NO: 4257 - protein, 11 aa, Homo sapien
ELSLLSLYGIH

SEQ ID NO: 4258 - protein, 11 aa, Homo sapien
ELVEKFYDPMF

SEQ ID NO: 4259 - protein, 9 aa, Homo sapien
ELYFEKGEY

SEQ ID NO: 4260 - protein, 10 aa, Homo sapien
ELYFEKGEYF

SEQ ID NO: 4261 - protein, 9 aa, Homo sapien
EMKTYSVSF

SEQ ID NO: 4262 - protein, 10 aa, Homo sapien
EMYYRNETQH

SEQ ID NO: 4263 - protein, 10 aa, Homo sapien
ESETLKSEEF

SEQ ID NO: 4264 - protein, 9 aa, Homo sapien
ESFPGIYDA

SEQ ID NO: 4265 - protein, 11 aa, Homo sapien
ESFPGIYDALF

SEQ ID NO: 4266 - protein, 8 aa, Homo sapien
ESKVDPSK

SEQ ID NO: 4267 - protein, 9 aa, Homo sapien
ESKVDPSKA

SEQ ID NO: 4268 - protein, 8 aa, Homo sapien
ESSWPQGF

SEQ ID NO: 4269 - protein, 9 aa, Homo sapien
ESYKHEQVY

SEQ ID NO: 4270 - protein, 11 aa, Homo sapien
ESYKHEQVYIR

SEQ ID NO: 4271 - protein, 9 aa, Homo sapien
ETDSAVATA

SEQ ID NO: 4272 - protein, 10 aa, Homo sapien
ETDSAVATAR

SEQ ID NO: 4273 - protein, 11 aa, Homo sapien
ETDSAVATARR

SEQ ID NO: 4274 - protein, 8 aa, Homo sapien
ETLKSEEF

SEQ ID NO: 4275 - protein, 10 aa, Homo sapien
ETLKSEEFQK

SEQ ID NO: 4276 - protein, 11 aa, Homo sapien
ETLKSEEFQKR

SEQ ID NO: 4277 - protein, 8 aa, Homo sapien
ETNKFSGY

SEQ ID NO: 4278 - protein, 11 aa, Homo sapien
ETNKFSGYPLY

SEQ ID NO: 4279 - protein, 8 aa, Homo sapien
ETYELVEK

SEQ ID NO: 4280 - protein, 9 aa, Homo sapien
ETYELVEKF

SEQ ID NO: 4281 - protein, 10 aa, Homo sapien
ETYELVEKFY

SEQ ID NO: 4282 - protein, 10 aa, Homo sapien
EVFFQRLGIA

SEQ ID NO: 4283 - protein, 9 aa, Homo sapien
EVKRQIYVA

SEQ ID NO: 4284 - protein, 10 aa, Homo sapien
EVKRQIYVAA

SEQ ID NO: 4285 - protein, 11 aa, Homo sapien
EVKRQIYVAAF

SEQ ID NO: 4286 - protein, 8 aa, Homo sapien
FAPGVKSY

SEQ ID NO: 4287 - protein, 9 aa, Homo sapien
FASWDAEEF

SEQ ID NO: 4288 - protein, 11 aa, Homo sapien
FDCRDYAVVLR

SEQ ID NO: 4289 - protein, 11 aa, Homo sapien
FDIESKVDPSK

SEQ ID NO: 4290 - protein, 10 aa, Homo sapien
FDKSNPIVLR

SEQ ID NO: 4291 - protein, 9 aa, Homo sapien
FDSLFSAVK

SEQ ID NO: 4292 - protein, 11 aa, Homo sapien
FDSLFSAVKNF

SEQ ID NO: 4293 - protein, 9 aa, Homo sapien
FFKLERDMK

SEQ ID NO: 4294 - protein, 8 aa, Homo sapien
FFLLGFLF

SEQ ID NO: 4295 - protein, 11 aa, Homo sapien
FFLLGFLFGWF

SEQ ID NO: 4296 - protein, 8 aa, Homo sapien
FFQRLGIA

SEQ ID NO: 4297 - protein, 11 aa, Homo sapien
FFQRLGIASGR

SEQ ID NO: 4298 - protein, 10 aa, Homo sapien
FFWLDRSVLA

SEQ ID NO: 4299 - protein, 11 aa, Homo sapien
FFWLDRSVLAK

SEQ ID NO: 4300 - protein, 10 aa, Homo sapien
FGGIDPQSGA

SEQ ID NO: 4301 - protein, 11 aa, Homo sapien
FGGIDPQSGAA

SEQ ID NO: 4302 - protein, 8 aa, Homo sapien
FGIWSKVY

SEQ ID NO: 4303 - protein, 9 aa, Homo sapien
FGLDSVELA

SEQ ID NO: 4304 - protein, 10 aa, Homo sapien
FGLDSVELAH

SEQ ID NO: 4305 - protein, 11 aa, Homo sapien
FGLDSVELAHY

SEQ ID NO: 4306 - protein, 10 aa, Homo sapien
FGLLGSTEWA

SEQ ID NO: 4307 - protein, 10 aa, Homo sapien
FGTLKKEGWR

SEQ ID NO: 4308 - protein, 11 aa, Homo sapien
FGWFIKSSNEA

SEQ ID NO: 4309 - protein, 10 aa, Homo sapien
FIDPLGLPDR

SEQ ID NO: 4310 - protein, 8 aa, Homo sapien
FIKSSNEA

SEQ ID NO: 4311 - protein, 11 aa, Homo sapien
FLDELKAENIK

SEQ ID NO: 4312 - protein, 8 aa, Homo sapien
FLFGWFIK

SEQ ID NO: 4313 - protein, 11 aa, Homo sapien
FLFLLFFWLDR

SEQ ID NO: 4314 - protein, 9 aa, Homo sapien
FLLFFWLDR

SEQ ID NO: 4315 - protein, 10 aa, Homo sapien
FLLGFLFGWF

SEQ ID NO: 4316 - protein, 8 aa, Homo sapien
FLNESYKH

SEQ ID NO: 4317 - protein, 10 aa, Homo sapien
FLRPGDDSSH

SEQ ID NO: 4318 - protein, 11 aa, Homo sapien
FLTLSVTWIGA

SEQ ID NO: 4319 - protein, 10 aa, Homo sapien
FLYNFTQIPH

SEQ ID NO: 4320 - protein, 11 aa, Homo sapien
FSAVKNFTEIA

SEQ ID NO: 4321 - protein, 8 aa, Homo sapien
FSERLQDF

SEQ ID NO: 4322 - protein, 10 aa, Homo sapien
FSERLQDFDK

SEQ ID NO: 4323 - protein, 9 aa, Homo sapien
FSGMPRISK

SEQ ID NO: 4324 - protein, 8 aa, Homo sapien
FSGYPLYH

SEQ ID NO: 4325 - protein, 11 aa, Homo sapien
FSGYPLYHSVY

SEQ ID NO: 4326 - protein, 9 aa, Homo sapien
FSTQKVKMH

SEQ ID NO: 4327 - protein, 11 aa, Homo sapien
FSTQKVKMHIH

SEQ ID NO: 4328 - protein, 8 aa, Homo sapien
FTEIASKF

SEQ ID NO: 4329 - protein, 11 aa, Homo sapien
FTEIASKFSER

SEQ ID NO: 4330 - protein, 9 aa, Homo sapien
FTGNFSTQK

SEQ ID NO: 4331 - protein, 11 aa, Homo sapien
FTGNFSTQKVK

SEQ ID NO: 4332 - protein, 8 aa, Homo sapien
FTQIPHLA

SEQ ID NO: 4333 - protein, 8 aa, Homo sapien
FVTLVFRH

SEQ ID NO: 4334 - protein, 11 aa, Homo sapien
FVTLVFRHGDR

SEQ ID NO: 4335 - protein, 9 aa, Homo sapien
GAAPLILSR

SEQ ID NO: 4336 - protein, 10 aa, Homo sapien
GAAVVHEIVR

SEQ ID NO: 4337 - protein, 10 aa, Homo sapien
GAGDPLTPGY

SEQ ID NO: 4338 - protein, 8 aa, Homo sapien
GAKGVILY

SEQ ID NO: 4339 - protein, 9 aa, Homo sapien
GALVLAGGF

SEQ ID NO: 4340 - protein, 10 aa, Homo sapien
GALVLAGGFF

SEQ ID NO: 4341 - protein, 8 aa, Homo sapien
GAVEPDRY

SEQ ID NO: 4342 - protein, 9 aa, Homo sapien
GAVPLIQSR

SEQ ID NO: 4343 - protein, 10 aa, Homo sapien
GCSPSCPLER

SEQ ID NO: 4344 - protein, 11 aa, Homo sapien
GCSPSCPLERF

SEQ ID NO: 4345 - protein, 8 aa, Homo sapien
GDLVYVNY

SEQ ID NO: 4346 - protein, 9 aa, Homo sapien
GDLVYVNYA

SEQ ID NO: 4347 - protein, 10 aa, Homo sapien
GDLVYVNYAR

SEQ ID NO: 4348 - protein, 8 aa, Homo sapien
GDPLTPGY

SEQ ID NO: 4349 - protein, 10 aa, Homo sapien
GDPLTPGYPA

SEQ ID NO: 4350 - protein, 9 aa, Homo sapien
GDRSPIDTF

SEQ ID NO: 4351 - protein, 8 aa, Homo sapien
GFEGKSLY

SEQ ID NO: 4352 - protein, 9 aa, Homo sapien
GFFLLGFLF

SEQ ID NO: 4353 - protein, 9 aa, Homo sapien
GFLFGWFIK

SEQ ID NO: 4354 - protein, 8 aa, Homo sapien
GFLFLLFF

SEQ ID NO: 4355 - protein, 10 aa, Homo sapien
GFTGNFSTQK

SEQ ID NO: 4356 - protein, 8 aa, Homo sapien
GGFFLLGF

SEQ ID NO: 4357 - protein, 10 aa, Homo sapien
GGFFLLGFLF

SEQ ID NO: 4358 - protein, 9 aa, Homo sapien
GGHRDSWVF

SEQ ID NO: 4359 - protein, 9 aa, Homo sapien
GGIDPQSGA

SEQ ID NO: 4360 - protein, 10 aa, Homo sapien
GGIDPQSGAA

SEQ ID NO: 4361 - protein, 8 aa, Homo sapien
GGMVFELA

SEQ ID NO: 4362 - protein, 11 aa, Homo sapien
GGSAPPDSSWR

SEQ ID NO: 4363 - protein, 11 aa, Homo sapien
GGVLVNEILNH

SEQ ID NO: 4364 - protein, 8 aa, Homo sapien
GGWECEKH

SEQ ID NO: 4365 - protein, 8 aa, Homo sapien
GGWECEKH

SEQ ID NO: 4366 - protein, 8 aa, Homo sapien
GIASGRAR

SEQ ID NO: 4367 - protein, 9 aa, Homo sapien
GIASGRARY

SEQ ID NO: 4368 - protein, 11 aa, Homo sapien
GIASGRARYTK

SEQ ID NO: 4369 - protein, 8 aa, Homo sapien
GIDPQSGA

SEQ ID NO: 4370 - protein, 9 aa, Homo sapien
GIDPQSGAA

SEQ ID NO: 4371 - protein, 8 aa, Homo sapien
GIHKQKEK

SEQ ID NO: 4372 - protein, 10 aa, Homo sapien
GIHKQKEKSR

SEQ ID NO: 4373 - protein, 11 aa, Homo sapien
GITSWGPEPCA

SEQ ID NO: 4374 - protein, 11 aa, Homo sapien
GITSWGSEPCA

SEQ ID NO: 4375 - protein, 11 aa, Homo sapien
GIWSKVYDPLY

SEQ ID NO: 4376 - protein, 8 aa, Homo sapien
GLDSVELA

SEQ ID NO: 4377 - protein, 9 aa, Homo sapien
GLDSVELAH

SEQ ID NO: 4378 - protein, 10 aa, Homo sapien
GLDSVELAHY

SEQ ID NO: 4379 - protein, 8 aa, Homo sapien
GLHGQDLF

SEQ ID NO: 4380 - protein, 9 aa, Homo sapien
GLLGSTEWA

SEQ ID NO: 4381 - protein, 10 aa, Homo sapien
GLLPPYASCH

SEQ ID NO: 4382 - protein, 8 aa, Homo sapien
GLPDRPFY

SEQ ID NO: 4383 - protein, 9 aa, Homo sapien
GLPDRPFYR

SEQ ID NO: 4384 - protein, 10 aa, Homo sapien
GLPDRPFYRH

SEQ ID NO: 4385 - protein, 8 aa, Homo sapien
GLPSIPVH

SEQ ID NO: 4386 - protein, 8 aa, Homo sapien
GLPTQEPA

SEQ ID NO: 4387 - protein, 9 aa, Homo sapien
GLQMALDVY

SEQ ID NO: 4388 - protein, 11 aa, Homo sapien
GMEQHYELGEY

SEQ ID NO: 4389 - protein, 9 aa, Homo sapien
GMPEGDLVY

SEQ ID NO: 4390 - protein, 10 aa, Homo sapien
GSAPPDSSWR

SEQ ID NO: 4391 - protein, 10 aa, Homo sapien
GSEPCALPER

SEQ ID NO: 4392 - protein, 9 aa, Homo sapien
GSGNDFEVF

SEQ ID NO: 4393 - protein, 10 aa, Homo sapien
GSGNDFEVFF

SEQ ID NO: 4394 - protein, 8 aa, Homo sapien
GSIEPEEF

SEQ ID NO: 4395 - protein, 8 aa, Homo sapien
GSIEPEEF

SEQ ID NO: 4396 - protein, 10 aa, Homo sapien
GSIEPEEFLR

SEQ ID NO: 4397 - protein, 11 aa, Homo sapien
GSTEWAEENSR

SEQ ID NO: 4398 - protein, 9 aa, Homo sapien
GTEQNFQLA

SEQ ID NO: 4399 - protein, 10 aa, Homo sapien
GTEQNFQLAK

SEQ ID NO: 4400 - protein, 9 aa, Homo sapien
GTLKKEGWR

SEQ ID NO: 4401 - protein, 11 aa, Homo sapien
GTLKKEGWRPR

SEQ ID NO: 4402 - protein, 11 aa, Homo sapien
GTLRGAVEPDR

SEQ ID NO: 4403 - protein, 9 aa, Homo sapien
GVILYSDPA

SEQ ID NO: 4404 - protein, 11 aa, Homo sapien
GVILYSDPADY

SEQ ID NO: 4405 - protein, 10 aa, Homo sapien
GVLVNEILNH

SEQ ID NO: 4406 - protein, 8 aa, Homo sapien
HCGGVLVH

SEQ ID NO: 4407 - protein, 11 aa, Homo sapien
HDTTVSGLQMA

SEQ ID NO: 4408 - protein, 10 aa, Homo sapien
HGDRSPIDTF

SEQ ID NO: 4409 - protein, 11 aa, Homo sapien
HGQDLFGIWSK

SEQ ID NO: 4410 - protein, 10 aa, Homo sapien
HIHSTNEVTR

SEQ ID NO: 4411 - protein, 9 aa, Homo sapien
HLAGTEQNF

SEQ ID NO: 4412 - protein, 9 aa, Homo sapien
HLLSNDMCA

SEQ ID NO: 4413 - protein, 10 aa, Homo sapien
HLLSNDMCAR

SEQ ID NO: 4414 - protein, 11 aa, Homo sapien
HLLSNDMCARA

SEQ ID NO: 4415 - protein, 9 aa, Homo sapien
HLTELYFEK

SEQ ID NO: 4416 - protein, 8 aa, Homo sapien
HLTVAQVR

SEQ ID NO: 4417 - protein, 11 aa, Homo sapien
HMKRATQIPSY

SEQ ID NO: 4418 - protein, 8 aa, Homo sapien
HSFPHPLY

SEQ ID NO: 4419 - protein, 8 aa, Homo sapien
HSFPHPLY

SEQ ID NO: 4420 - protein, 8 aa, Homo sapien
HSQPWQVA

SEQ ID NO: 4421 - protein, 10 aa, Homo sapien
HSQPWQVAVY

SEQ ID NO: 4422 - protein, 10 aa, Homo sapien
HSQPWQVLVA

SEQ ID NO: 4423 - protein, 8 aa, Homo sapien
HSTNEVTR

SEQ ID NO: 4424 - protein, 10 aa, Homo sapien
HSTNEVTRIY

SEQ ID NO: 4425 - protein, 9 aa, Homo sapien
HVISNDVCA

SEQ ID NO: 4426 - protein, 9 aa, Homo sapien
HVIYAPSSH

SEQ ID NO: 4427 - protein, 11 aa, Homo sapien
HVIYAPSSHNK

SEQ ID NO: 4428 - protein, 10 aa, Homo sapien
IALSVGCTGA

SEQ ID NO: 4429 - protein, 8 aa, Homo sapien
IARYGKVF

SEQ ID NO: 4430 - protein, 9 aa, Homo sapien
IARYGKVFR

SEQ ID NO: 4431 - protein, 8 aa, Homo sapien
IASGRARY

SEQ ID NO: 4432 - protein, 10 aa, Homo sapien
IASGRARYTK

SEQ ID NO: 4433 - protein, 8 aa, Homo sapien
IASKFSER

SEQ ID NO: 4434 - protein, 11 aa, Homo sapien
IATLGKLSGLH

SEQ ID NO: 4435 - protein, 9 aa, Homo sapien
IDPLGLPDR

SEQ ID NO: 4436 - protein, 11 aa, Homo sapien
IDPLGLPDRPF

SEQ ID NO: 4437 - protein, 8 aa, Homo sapien
IDPQSGAA

SEQ ID NO: 4438 - protein, 11 aa, Homo sapien
IDPQSGAAVVH

SEQ ID NO: 4439 - protein, 10 aa, Homo sapien
IDTFPTDPIK

SEQ ID NO: 4440 - protein, 10 aa, Homo sapien
IGAAPLILSR

SEQ ID NO: 4441 - protein, 8 aa, Homo sapien
IGYYDAQK

SEQ ID NO: 4442 - protein, 10 aa, Homo sapien
IINEDGNEIF

SEQ ID NO: 4443 - protein, 8 aa, Homo sapien
ILFASWDA

SEQ ID NO: 4444 - protein, 11 aa, Homo sapien
ILFASWDAEEF

SEQ ID NO: 4445 - protein, 11 aa, Homo sapien
ILGGHRDSWVF

SEQ ID NO: 4446 - protein, 9 aa, Homo sapien
ILLGRHSLF

SEQ ID NO: 4447 - protein, 10 aa, Homo sapien
ILLGRHSLFH

SEQ ID NO: 4448 - protein, 10 aa, Homo sapien
ILLWQPIPVH

SEQ ID NO: 4449 - protein, 8 aa, Homo sapien
ILNHMKRA

SEQ ID NO: 4450 - protein, 9 aa, Homo sapien
ILYSDPADY

SEQ ID NO: 4451 - protein, 10 aa, Homo sapien
ILYSDPADYF

SEQ ID NO: 4452 - protein, 11 aa, Homo sapien
ILYSDPADYFA

SEQ ID NO: 4453 - protein, 10 aa, Homo sapien
ISKLGSGNDF

SEQ ID NO: 4454 - protein, 10 aa, Homo sapien
ISMKHPQEMK

SEQ ID NO: 4455 - protein, 10 aa, Homo sapien
ISNDVCAQVH

SEQ ID NO: 4456 - protein, 8 aa, Homo sapien
ITPKHNMK

SEQ ID NO: 4457 - protein, 9 aa, Homo sapien
ITPKHNMKA

SEQ ID NO: 4458 - protein, 10 aa, Homo sapien
ITPKHNMKAF

SEQ ID NO: 4459 - protein, 10 aa, Homo sapien
ITSWGPEPCA

SEQ ID NO: 4460 - protein, 10 aa, Homo sapien
ITSWGSEPCA

SEQ ID NO: 4461 - protein, 9 aa, Homo sapien
IVGGWECEK

SEQ ID NO: 4462 - protein, 9 aa, Homo sapien
IVGGWECEK

SEQ ID NO: 4463 - protein, 10 aa, Homo sapien
IVGGWECEKH

SEQ ID NO: 4464 - protein, 10 aa, Homo sapien
IVGGWECEKH

SEQ ID NO: 4465 - protein, 8 aa, Homo sapien
IVIARYGK

SEQ ID NO: 4466 - protein, 10 aa, Homo sapien
IVIARYGKVF

SEQ ID NO: 4467 - protein, 11 aa, Homo sapien
IVIARYGKVFR

SEQ ID NO: 4468 - protein, 8 aa, Homo sapien
IVLPFDCR

SEQ ID NO: 4469 - protein, 10 aa, Homo sapien
IVLPFDCRDY

SEQ ID NO: 4470 - protein, 11 aa, Homo sapien
IVLPFDCRDYA

SEQ ID NO: 4471 - protein, 8 aa, Homo sapien
IVPPFSAF

SEQ ID NO: 4472 - protein, 9 aa, Homo sapien
IVRSFGTLK

SEQ ID NO: 4473 - protein, 10 aa, Homo sapien
IVRSFGTLKK

SEQ ID NO: 4474 - protein, 8 aa, Homo sapien
KAENIKKF

SEQ ID NO: 4475 - protein, 10 aa, Homo sapien
KAENIKKFLY

SEQ ID NO: 4476 - protein, 8 aa, Homo sapien
KAFLDELK

SEQ ID NO: 4477 - protein, 9 aa, Homo sapien
KAFLDELKA

SEQ ID NO: 4478 - protein, 8 aa, Homo sapien
KAWGEVKR

SEQ ID NO: 4479 - protein, 11 aa, Homo sapien
KAWGEVKRQIY

SEQ ID NO: 4480 - protein, 9 aa, Homo sapien
KDFIATLGK

SEQ ID NO: 4481 - protein, 8 aa, Homo sapien
KFLNESYK

SEQ ID NO: 4482 - protein, 9 aa, Homo sapien
KFLNESYKH

SEQ ID NO: 4483 - protein, 11 aa, Homo sapien
KFLYNFTQIPH

SEQ ID NO: 4484 - protein, 8 aa, Homo sapien
KFMLCAGR

SEQ ID NO: 4485 - protein, 9 aa, Homo sapien
KFSERLQDF

SEQ ID NO: 4486 - protein, 11 aa, Homo sapien
KFSERLQDFDK

SEQ ID NO: 4487 - protein, 8 aa, Homo sapien
KFSGYPLY

SEQ ID NO: 4488 - protein, 9 aa, Homo sapien
KFSGYPLYH

SEQ ID NO: 4489 - protein, 8 aa, Homo sapien
KFVTLVFR

SEQ ID NO: 4490 - protein, 9 aa, Homo sapien
KFVTLVFRH

SEQ ID NO: 4491 - protein, 8 aa, Homo sapien
KFYDPMFK

SEQ ID NO: 4492 - protein, 9 aa, Homo sapien
KFYDPMFKY

SEQ ID NO: 4493 - protein, 10 aa, Homo sapien
KFYDPMFKYH

SEQ ID NO: 4494 - protein, 9 aa, Homo sapien
KGEYFVEMY

SEQ ID NO: 4495 - protein, 10 aa, Homo sapien
KGEYFVEMYY

SEQ ID NO: 4496 - protein, 11 aa, Homo sapien
KGEYFVEMYYR

SEQ ID NO: 4497 - protein, 10 aa, Homo sapien
KGVILYSDPA

SEQ ID NO: 4498 - protein, 11 aa, Homo sapien
KINCSGKIVIA

SEQ ID NO: 4499 - protein, 9 aa, Homo sapien
KIVIARYGK

SEQ ID NO: 4500 - protein, 11 aa, Homo sapien
KIVIARYGKVF

SEQ ID NO: 4501 - protein, 8 aa, Homo sapien
KIYSISMK

SEQ ID NO: 4502 - protein, 9 aa, Homo sapien
KIYSISMKH

SEQ ID NO: 4503 - protein, 8 aa, Homo sapien
KLGSGNDF

SEQ ID NO: 4504 - protein, 11 aa, Homo sapien
KLGSGNDFEVF

SEQ ID NO: 4505 - protein, 8 aa, Homo sapien
KLIMYSAH

SEQ ID NO: 4506 - protein, 10 aa, Homo sapien
KLLEKMGGSA

SEQ ID NO: 4507 - protein, 8 aa, Homo sapien
KLQCVDLH

SEQ ID NO: 4508 - protein, 11 aa, Homo sapien
KLSGLHGQDLF

SEQ ID NO: 4509 - protein, 8 aa, Homo sapien
KSEEFQKR

SEQ ID NO: 4510 - protein, 10 aa, Homo sapien
KSEEFQKRLH

SEQ ID NO: 4511 - protein, 9 aa, Homo sapien
KSLYESWTK

SEQ ID NO: 4512 - protein, 10 aa, Homo sapien
KSLYESWTKK

SEQ ID NO: 4513 - protein, 8 aa, Homo sapien
KSNPIVLR

SEQ ID NO: 4514 - protein, 10 aa, Homo sapien
KSPDEGFEGK

SEQ ID NO: 4515 - protein, 8 aa, Homo sapien
KSVILLGR

SEQ ID NO: 4516 - protein, 9 aa, Homo sapien
KSVILLGRH

SEQ ID NO: 4517 - protein, 11 aa, Homo sapien
KTYSVSFDSLF

SEQ ID NO: 4518 - protein, 9 aa, Homo sapien
KVFRGNKVK

SEQ ID NO: 4519 - protein, 11 aa, Homo sapien
KVFRGNKVKNA

SEQ ID NO: 4520 - protein, 8 aa, Homo sapien
KVKNAQLA

SEQ ID NO: 4521 - protein, 10 aa, Homo sapien
KVKNAQLAGA

SEQ ID NO: 4522 - protein, 11 aa, Homo sapien
KVKNAQLAGAK

SEQ ID NO: 4523 - protein, 11 aa, Homo sapien
KVLGLPTQEPA

SEQ ID NO: 4524 - protein, 11 aa, Homo sapien
KVMDLPTQEPA

SEQ ID NO: 4525 - protein, 10 aa, Homo sapien
KVPYNVGPGF

SEQ ID NO: 4526 - protein, 9 aa, Homo sapien
KVTEFMLCA

SEQ ID NO: 4527 - protein, 9 aa, Homo sapien
KVTKFMLCA

SEQ ID NO: 4528 - protein, 11 aa, Homo sapien
KVTKFMLCAGR

SEQ ID NO: 4529 - protein, 10 aa, Homo sapien
KVVHYRKWIK

SEQ ID NO: 4530 - protein, 10 aa, Homo sapien
KVVHYRKWIK

SEQ ID NO: 4531 - protein, 10 aa, Homo sapien
LAGAKGVILY

SEQ ID NO: 4532 - protein, 10 aa, Homo sapien
LAGGFFLLGF

SEQ ID NO: 4533 - protein, 8 aa, Homo sapien
LAGTEQNF

SEQ ID NO: 4534 - protein, 11 aa, Homo sapien
LAGTEQNFQLA

SEQ ID NO: 4535 - protein, 10 aa, Homo sapien
LAHYDVLLSY

SEQ ID NO: 4536 - protein, 10 aa, Homo sapien
LAKQIQSQWK

SEQ ID NO: 4537 - protein, 9 aa, Homo sapien
LANSIVLPF

SEQ ID NO: 4538 - protein, 11 aa, Homo sapien
LARAASLSLGF

SEQ ID NO: 4539 - protein, 9 aa, Homo sapien
LCAGALVLA

SEQ ID NO: 4540 - protein, 10 aa, Homo sapien
LCAGLWTGGK

SEQ ID NO: 4541 - protein, 10 aa, Homo sapien
LCAGRWTGGK

SEQ ID NO: 4542 - protein, 10 aa, Homo sapien
LDELKAENIK

SEQ ID NO: 4543 - protein, 11 aa, Homo sapien
LDELKAENIKK

SEQ ID NO: 4544 - protein, 8 aa, Homo sapien
LDRSVLAK

SEQ ID NO: 4545 - protein, 11 aa, Homo sapien
LDRSVLAKELK

SEQ ID NO: 4546 - protein, 8 aa, Homo sapien
LDSVELAH

SEQ ID NO: 4547 - protein, 9 aa, Homo sapien
LDSVELAHY

SEQ ID NO: 4548 - protein, 11 aa, Homo sapien
LDVYNGLLPPY

SEQ ID NO: 4549 - protein, 10 aa, Homo sapien
LFASWDAEEF

SEQ ID NO: 4550 - protein, 10 aa, Homo sapien
LFEPEDTGQR

SEQ ID NO: 4551 - protein, 9 aa, Homo sapien
LFEPPPPGY

SEQ ID NO: 4552 - protein, 11 aa, Homo sapien
LFFWLDRSVLA

SEQ ID NO: 4553 - protein, 9 aa, Homo sapien
LFGIWSKVY

SEQ ID NO: 4554 - protein, 11 aa, Homo sapien
LFHPEDTGQVF

SEQ ID NO: 4555 - protein, 10 aa, Homo sapien
LFLLFFWLDR

SEQ ID NO: 4556 - protein, 8 aa, Homo sapien
LFSAVKNF

SEQ ID NO: 4557 - protein, 8 aa, Homo sapien
LGEYIRKR

SEQ ID NO: 4558 - protein, 9 aa, Homo sapien
LGEYIRKRY

SEQ ID NO: 4559 - protein, 10 aa, Homo sapien
LGEYIRKRYR

SEQ ID NO: 4560 - protein, 11 aa, Homo sapien
LGEYIRKRYRK

SEQ ID NO: 4561 - protein, 8 aa, Homo sapien
LGFLFGWF

SEQ ID NO: 4562 - protein, 10 aa, Homo sapien
LGFLFGWFIK

SEQ ID NO: 4563 - protein, 8 aa, Homo sapien
LGFLFLLF

SEQ ID NO: 4564 - protein, 9 aa, Homo sapien
LGFLFLLFF

SEQ ID NO: 4565 - protein, 10 aa, Homo sapien
LGGHRDSWVF

SEQ ID NO: 4566 - protein, 8 aa, Homo sapien
LGIASGRA

SEQ ID NO: 4567 - protein, 9 aa, Homo sapien
LGIASGRAR

SEQ ID NO: 4568 - protein, 10 aa, Homo sapien
LGIASGRARY

SEQ ID NO: 4569 - protein, 8 aa, Homo sapien
LGKLSGLH

SEQ ID NO: 4570 - protein, 8 aa, Homo sapien
LGLPDRPF

SEQ ID NO: 4571 - protein, 9 aa, Homo sapien
LGLPDRPFY

SEQ ID NO: 4572 - protein, 10 aa, Homo sapien
LGLPDRPFYR

SEQ ID NO: 4573 - protein, 11 aa, Homo sapien
LGLPDRPFYRH

SEQ ID NO: 4574 - protein, 9 aa, Homo sapien
LGLPTQEPA

SEQ ID NO: 4575 - protein, 8 aa, Homo sapien
LGRHSLFH

SEQ ID NO: 4576 - protein, 10 aa, Homo sapien
LGSGNDFEVF

SEQ ID NO: 4577 - protein, 11 aa, Homo sapien
LGSGNDFEVFF

SEQ ID NO: 4578 - protein, 9 aa, Homo sapien
LLEKMGGSA

SEQ ID NO: 4579 - protein, 8 aa, Homo sapien
LLFFWLDR

SEQ ID NO: 4580 - protein, 9 aa, Homo sapien
LLGFLFGWF

SEQ ID NO: 4581 - protein, 11 aa, Homo sapien
LLGFLFGWFIK

SEQ ID NO: 4582 - protein, 8 aa, Homo sapien
LLGRHSLF

SEQ ID NO: 4583 - protein, 9 aa, Homo sapien
LLGRHSLFH

SEQ ID NO: 4584 - protein, 8 aa, Homo sapien
LLGSTEWA

SEQ ID NO: 4585 - protein, 8 aa, Homo sapien
LLHETDSA

SEQ ID NO: 4586 - protein, 10 aa, Homo sapien
LLHETDSAVA

SEQ ID NO: 4587 - protein, 8 aa, Homo sapien
LLKHQSLR

SEQ ID NO: 4588 - protein, 8 aa, Homo sapien
LLKNRFLR

SEQ ID NO: 4589 - protein, 9 aa, Homo sapien
LLPPYASCH

SEQ ID NO: 4590 - protein, 8 aa, Homo sapien
LLQERGVA

SEQ ID NO: 4591 - protein, 9 aa, Homo sapien
LLQERGVAY

SEQ ID NO: 4592 - protein, 8 aa, Homo sapien
LLRLSEPA

SEQ ID NO: 4593 - protein, 8 aa, Homo sapien
LLRLSEPA

SEQ ID NO: 4594 - protein, 9 aa, Homo sapien
LLRLSEPAK

SEQ ID NO: 4595 - protein, 8 aa, Homo sapien
LLSLYGIH

SEQ ID NO: 4596 - protein, 9 aa, Homo sapien
LLSLYGIHK

SEQ ID NO: 4597 - protein, 11 aa, Homo sapien
LLSLYGIHKQK

SEQ ID NO: 4598 - protein, 8 aa, Homo sapien
LLSNDMCA

SEQ ID NO: 4599 - protein, 9 aa, Homo sapien
LLSNDMCAR

SEQ ID NO: 4600 - protein, 10 aa, Homo sapien
LLSNDMCARA

SEQ ID NO: 4601 - protein, 11 aa, Homo sapien
LLSNDMCARAY

SEQ ID NO: 4602 - protein, 9 aa, Homo sapien
LLSYPNKTH

SEQ ID NO: 4603 - protein, 9 aa, Homo sapien
LLWQPIPVH

SEQ ID NO: 4604 - protein, 11 aa, Homo sapien
LLYLPFRNCPR

SEQ ID NO: 4605 - protein, 8 aa, Homo sapien
LMFLERAF

SEQ ID NO: 4606 - protein, 10 aa, Homo sapien
LMLLRLSEPA

SEQ ID NO: 4607 - protein, 10 aa, Homo sapien
LMLLRLSEPA

SEQ ID NO: 4608 - protein, 11 aa, Homo sapien
LMLLRLSEPAK

SEQ ID NO: 4609 - protein, 9 aa, Homo sapien
LMSAMTNLA

SEQ ID NO: 4610 - protein, 10 aa, Homo sapien
LMSAMTNLAA

SEQ ID NO: 4611 - protein, 11 aa, Homo sapien
LMYSLVHNLTK

SEQ ID NO: 4612 - protein, 8 aa, Homo sapien
LSEDQLLY

SEQ ID NO: 4613 - protein, 11 aa, Homo sapien
LSEDQLLYLPF

SEQ ID NO: 4614 - protein, 10 aa, Homo sapien
LSELSLLSLY

SEQ ID NO: 4615 - protein, 10 aa, Homo sapien
LSEPAELTDA

SEQ ID NO: 4616 - protein, 10 aa, Homo sapien
LSGLHGQDLF

SEQ ID NO: 4617 - protein, 10 aa, Homo sapien
LSLGFLFLLF

SEQ ID NO: 4618 - protein, 11 aa, Homo sapien
LSLGFLFLLFF

SEQ ID NO: 4619 - protein, 10 aa, Homo sapien
LSLLSLYGIH

SEQ ID NO: 4620 - protein, 11 aa, Homo sapien
LSLLSLYGIHK

SEQ ID NO: 4621 - protein, 8 aa, Homo sapien
LSLYGIHK

SEQ ID NO: 4622 - protein, 10 aa, Homo sapien
LSLYGIHKQK

SEQ ID NO: 4623 - protein, 8 aa, Homo sapien
LSNDMCAR

SEQ ID NO: 4624 - protein, 9 aa, Homo sapien
LSNDMCARA

SEQ ID NO: 4625 - protein, 10 aa, Homo sapien
LSNDMCARAY

SEQ ID NO: 4626 - protein, 8 aa, Homo sapien
LSVGCTGA

SEQ ID NO: 4627 - protein, 8 aa, Homo sapien
LSVTWIGA

SEQ ID NO: 4628 - protein, 9 aa, Homo sapien
LSVTWIGAA

SEQ ID NO: 4629 - protein, 8 aa, Homo sapien
LSYPNKTH

SEQ ID NO: 4630 - protein, 11 aa, Homo sapien
LSYPNKTHPNY

SEQ ID NO: 4631 - protein, 8 aa, Homo sapien
LTAAHCIR

SEQ ID NO: 4632 - protein, 10 aa, Homo sapien
LTAAHCIRNK

SEQ ID NO: 4633 - protein, 8 aa, Homo sapien
LTAAHCLK

SEQ ID NO: 4634 - protein, 9 aa, Homo sapien
LTAAHCLKK

SEQ ID NO: 4635 - protein, 8 aa, Homo sapien
LTELYFEK

SEQ ID NO: 4636 - protein, 11 aa, Homo sapien
LTELYFEKGEY

SEQ ID NO: 4637 - protein, 10 aa, Homo sapien
LTLSVTWIGA

SEQ ID NO: 4638 - protein, 11 aa, Homo sapien
LTLSVTWIGAA

SEQ ID NO: 4639 - protein, 10 aa, Homo sapien
LTPGYPANEY

SEQ ID NO: 4640 - protein, 11 aa, Homo sapien
LTPGYPANEYA

SEQ ID NO: 4641 - protein, 9 aa, Homo sapien
LTQLGMEQH

SEQ ID NO: 4642 - protein, 10 aa, Homo sapien
LTQLGMEQHY

SEQ ID NO: 4643 - protein, 8 aa, Homo sapien
LVASRGRA

SEQ ID NO: 4644 - protein, 10 aa, Homo sapien
LVEKFYDPMF

SEQ ID NO: 4645 - protein, 11 aa, Homo sapien
LVEKFYDPMFK

SEQ ID NO: 4646 - protein, 8 aa, Homo sapien
LVFRHGDR

SEQ ID NO: 4647 - protein, 10 aa, Homo sapien
LVHNLTKELK

SEQ ID NO: 4648 - protein, 10 aa, Homo sapien
LVHPQWVLTA

SEQ ID NO: 4649 - protein, 10 aa, Homo sapien
LVHPQWVLTA

SEQ ID NO: 4650 - protein, 11 aa, Homo sapien
LVHPQWVLTAA

SEQ ID NO: 4651 - protein, 11 aa, Homo sapien
LVHPQWVLTAA

SEQ ID NO: 4652 - protein, 8 aa, Homo sapien
LVLAGGFF

SEQ ID NO: 4653 - protein, 8 aa, Homo sapien
LVNEILNH

SEQ ID NO: 4654 - protein, 10 aa, Homo sapien
LVNEILNHMK

SEQ ID NO: 4655 - protein, 11 aa, Homo sapien
LVNEILNHMKR

SEQ ID NO: 4656 - protein, 8 aa, Homo sapien
LVYVNYAR

SEQ ID NO: 4657 - protein, 9 aa, Homo sapien
MCARAYSEK

SEQ ID NO: 4658 - protein, 9 aa, Homo sapien
MDLPTQEPA

SEQ ID NO: 4659 - protein, 9 aa, Homo sapien
MFKYHLTVA

SEQ ID NO: 4660 - protein, 11 aa, Homo sapien
MLCAGLWTGGK

SEQ ID NO: 4661 - protein, 11 aa, Homo sapien
MLCAGRWTGGK

SEQ ID NO: 4662 - protein, 9 aa, Homo sapien
MLLRLSEPA

SEQ ID NO: 4663 - protein, 9 aa, Homo sapien
MLLRLSEPA

SEQ ID NO: 4664 - protein, 10 aa, Homo sapien
MLLRLSEPAK

SEQ ID NO: 4665 - protein, 8 aa, Homo sapien
MMNDQLMF

SEQ ID NO: 4666 - protein, 11 aa, Homo sapien
MMNDQLMFLER

SEQ ID NO: 4667 - protein, 8 aa, Homo sapien
MSAMTNLA

SEQ ID NO: 4668 - protein, 9 aa, Homo sapien
MSAMTNLAA

SEQ ID NO: 4669 - protein, 11 aa, Homo sapien
MSAMTNLAALF

SEQ ID NO: 4670 - protein, 10 aa, Homo sapien
MSLLKHQSLR

SEQ ID NO: 4671 - protein, 8 aa, Homo sapien
MSLLKNRF

SEQ ID NO: 4672 - protein, 10 aa, Homo sapien
MSLLKNRFLR

SEQ ID NO: 4673 - protein, 8 aa, Homo sapien
MTNLAALF

SEQ ID NO: 4674 - protein, 10 aa, Homo sapien
NADSSIEGNY

SEQ ID NO: 4675 - protein, 8 aa, Homo sapien
NAQLAGAK

SEQ ID NO: 4676 - protein, 9 aa, Homo sapien
NCSGKIVIA

SEQ ID NO: 4677 - protein, 10 aa, Homo sapien
NCSGKIVIAR

SEQ ID NO: 4678 - protein, 11 aa, Homo sapien
NCSGKIVIARY

SEQ ID NO: 4679 - protein, 9 aa, Homo sapien
NDFEVFFQR

SEQ ID NO: 4680 - protein, 8 aa, Homo sapien
NDMCARAY

SEQ ID NO: 4681 - protein, 11 aa, Homo sapien
NDMCARAYSEK

SEQ ID NO: 4682 - protein, 9 aa, Homo sapien
NDQLMFLER

SEQ ID NO: 4683 - protein, 10 aa, Homo sapien
NDQLMFLERA

SEQ ID NO: 4684 - protein, 11 aa, Homo sapien
NDQLMFLERAF

SEQ ID NO: 4685 - protein, 8 aa, Homo sapien
NDVCAQVH

SEQ ID NO: 4686 - protein, 11 aa, Homo sapien
NDVCAQVHPQK

SEQ ID NO: 4687 - protein, 8 aa, Homo sapien
NFSTQKVK

SEQ ID NO: 4688 - protein, 10 aa, Homo sapien
NFSTQKVKMH

SEQ ID NO: 4689 - protein, 8 aa, Homo sapien
NFTEIASK

SEQ ID NO: 4690 - protein, 9 aa, Homo sapien
NFTEIASKF

SEQ ID NO: 4691 - protein, 8 aa, Homo sapien
NFTLPSWA

SEQ ID NO: 4692 - protein, 9 aa, Homo sapien
NFTQIPHLA

SEQ ID NO: 4693 - protein, 11 aa, Homo sapien
NGAGDPLTPGY

SEQ ID NO: 4694 - protein, 8 aa, Homo sapien
NGLLPPYA

SEQ ID NO: 4695 - protein, 11 aa, Homo sapien
NGLLPPYASCH

SEQ ID NO: 4696 - protein, 9 aa, Homo sapien
NIKKFLYNF

SEQ ID NO: 4697 - protein, 8 aa, Homo sapien
NILNLNGA

SEQ ID NO: 4698 - protein, 9 aa, Homo sapien
NITPKHNMK

SEQ ID NO: 4699 - protein, 10 aa, Homo sapien
NITPKHNMKA

SEQ ID NO: 4700 - protein, 11 aa, Homo sapien
NITPKHNMKAF

SEQ ID NO: 4701 - protein, 11 aa, Homo sapien
NLFEPEDTGQR

SEQ ID NO: 4702 - protein, 9 aa, Homo sapien
NLLHETDSA

SEQ ID NO: 4703 - protein, 11 aa, Homo sapien
NLLHETDSAVA

SEQ ID NO: 4704 - protein, 9 aa, Homo sapien
NLPGGGVQR

SEQ ID NO: 4705 - protein, 10 aa, Homo sapien
NMKAFLDELK

SEQ ID NO: 4706 - protein, 11 aa, Homo sapien
NMKAFLDELKA

SEQ ID NO: 4707 - protein, 11 aa, Homo sapien
NMSLLKHQSLR

SEQ ID NO: 4708 - protein, 10 aa, Homo sapien
NSIVLPFDCR

SEQ ID NO: 4709 - protein, 8 aa, Homo sapien
NSQVWLGR

SEQ ID NO: 4710 - protein, 9 aa, Homo sapien
NSQVWLGRH

SEQ ID NO: 4711 - protein, 8 aa, Homo sapien
NSRLLQER

SEQ ID NO: 4712 - protein, 11 aa, Homo sapien
NSRLLQERGVA

SEQ ID NO: 4713 - protein, 10 aa, Homo sapien
NVGPGFTGNF

SEQ ID NO: 4714 - protein, 9 aa, Homo sapien
NVIGTLRGA

SEQ ID NO: 4715 - protein, 9 aa, Homo sapien
NVSDIVPPF

SEQ ID NO: 4716 - protein, 11 aa, Homo sapien
NVSDIVPPFSA

SEQ ID NO: 4717 - protein, 10 aa, Homo sapien
PADYFAPGVK

SEQ ID NO: 4718 - protein, 9 aa, Homo sapien
PAELTDAVK

SEQ ID NO: 4719 - protein, 9 aa, Homo sapien
PAKITDVVK

SEQ ID NO: 4720 - protein, 8 aa, Homo sapien
PALGTTCY

SEQ ID NO: 4721 - protein, 8 aa, Homo sapien
PALGTTCY

SEQ ID NO: 4722 - protein, 9 aa, Homo sapien
PALGTTCYA

SEQ ID NO: 4723 - protein, 9 aa, Homo sapien
PALGTTCYA

SEQ ID NO: 4724 - protein, 8 aa, Homo sapien
PANEYAYR

SEQ ID NO: 4725 - protein, 9 aa, Homo sapien
PANEYAYRR

SEQ ID NO: 4726 - protein, 9 aa, Homo sapien
PAVYTKVVH

SEQ ID NO: 4727 - protein, 10 aa, Homo sapien
PAVYTKVVHY

SEQ ID NO: 4728 - protein, 11 aa, Homo sapien
PAVYTKVVHYR

SEQ ID NO: 4729 - protein, 9 aa, Homo sapien
PCALPEKPA

SEQ ID NO: 4730 - protein, 11 aa, Homo sapien
PCALPEKPAVY

SEQ ID NO: 4731 - protein, 11 aa, Homo sapien
PCALPERPSLY

SEQ ID NO: 4732 - protein, 8 aa, Homo sapien
PDEGFEGK

SEQ ID NO: 4733 - protein, 11 aa, Homo sapien
PDEGFEGKSLY

SEQ ID NO: 4734 - protein, 8 aa, Homo sapien
PDRPFYRH

SEQ ID NO: 4735 - protein, 11 aa, Homo sapien
PDRPFYRHVIY

SEQ ID NO: 4736 - protein, 10 aa, Homo sapien
PDRYVILGGH

SEQ ID NO: 4737 - protein, 11 aa, Homo sapien
PDRYVILGGHR

SEQ ID NO: 4738 - protein, 10 aa, Homo sapien
PDSSWRGSLK

SEQ ID NO: 4739 - protein, 8 aa, Homo sapien
PFDCRDYA

SEQ ID NO: 4740 - protein, 8 aa, Homo sapien
PFRNCPRF

SEQ ID NO: 4741 - protein, 8 aa, Homo sapien
PFYRHVIY

SEQ ID NO: 4742 - protein, 9 aa, Homo sapien
PFYRHVIYA

SEQ ID NO: 4743 - protein, 11 aa, Homo sapien
PGCSPSCPLER

SEQ ID NO: 4744 - protein, 11 aa, Homo sapien
PGFTGNFSTQK

SEQ ID NO: 4745 - protein, 8 aa, Homo sapien
PGIYDALF

SEQ ID NO: 4746 - protein, 8 aa, Homo sapien
PGYPANEY

SEQ ID NO: 4747 - protein, 9 aa, Homo sapien
PGYPANEYA

SEQ ID NO: 4748 - protein, 10 aa, Homo sapien
PGYPANEYAY

SEQ ID NO: 4749 - protein, 11 aa, Homo sapien
PGYPANEYAYR

SEQ ID NO: 4750 - protein, 11 aa, Homo sapien
PIDTFPTDPIK

SEQ ID NO: 4751 - protein, 9 aa, Homo sapien
PIGYYDAQK

SEQ ID NO: 4752 - protein, 11 aa, Homo sapien
PIKESSWPQGF

SEQ ID NO: 4753 - protein, 11 aa, Homo sapien
PILLWQPIPVH

SEQ ID NO: 4754 - protein, 9 aa, Homo sapien
PLGLPDRPF

SEQ ID NO: 4755 - protein, 10 aa, Homo sapien
PLGLPDRPFY

SEQ ID NO: 4756 - protein, 11 aa, Homo sapien
PLGLPDRPFYR

SEQ ID NO: 4757 - protein, 8 aa, Homo sapien
PLLLARAA

SEQ ID NO: 4758 - protein, 8 aa, Homo sapien
PLMYSLVH

SEQ ID NO: 4759 - protein, 9 aa, Homo sapien
PLSEDQLLY

SEQ ID NO: 4760 - protein, 8 aa, Homo sapien
PLTPGYPA

SEQ ID NO: 4761 - protein, 11 aa, Homo sapien
PLTPGYPANEY

SEQ ID NO: 4762 - protein, 8 aa, Homo sapien
PLYCESVH

SEQ ID NO: 4763 - protein, 10 aa, Homo sapien
PLYCESVHNF

SEQ ID NO: 4764 - protein, 9 aa, Homo sapien
PLYDMSLLK

SEQ ID NO: 4765 - protein, 11 aa, Homo sapien
PLYDMSLLKNR

SEQ ID NO: 4766 - protein, 10 aa, Homo sapien
PLYHSVYETY

SEQ ID NO: 4767 - protein, 9 aa, Homo sapien
PLYNMSLLK

SEQ ID NO: 4768 - protein, 10 aa, Homo sapien
PLYNMSLLKH

SEQ ID NO: 4769 - protein, 10 aa, Homo sapien
PMFKYHLTVA

SEQ ID NO: 4770 - protein, 8 aa, Homo sapien
PSCPLERF

SEQ ID NO: 4771 - protein, 9 aa, Homo sapien
PSCPLERFA

SEQ ID NO: 4772 - protein, 10 aa, Homo sapien
PSIPVHPIGY

SEQ ID NO: 4773 - protein, 11 aa, Homo sapien
PSIPVHPIGYY

SEQ ID NO: 4774 - protein, 9 aa, Homo sapien
PSKAWGEVK

SEQ ID NO: 4775 - protein, 10 aa, Homo sapien
PSKAWGEVKR

SEQ ID NO: 4776 - protein, 9 aa, Homo sapien
PSLYTKVVH

SEQ ID NO: 4777 - protein, 10 aa, Homo sapien
PSLYTKVVHY

SEQ ID NO: 4778 - protein, 11 aa, Homo sapien
PSLYTKVVHYR

SEQ ID NO: 4779 - protein, 10 aa, Homo sapien
PSPEFSGMPR

SEQ ID NO: 4780 - protein, 8 aa, Homo sapien
PSSHNKYA

SEQ ID NO: 4781 - protein, 11 aa, Homo sapien
PSWATEDTMTK

SEQ ID NO: 4782 - protein, 9 aa, Homo sapien
PSYKKLIMY

SEQ ID NO: 4783 - protein, 11 aa, Homo sapien
PSYKKLIMYSA

SEQ ID NO: 4784 - protein, 8 aa, Homo sapien
PVHPIGYY

SEQ ID NO: 4785 - protein, 10 aa, Homo sapien
PVHPIGYYDA

SEQ ID NO: 4786 - protein, 8 aa, Homo sapien
PVSHSFPH

SEQ ID NO: 4787 - protein, 11 aa, Homo sapien
PVSHSFPHPLY

SEQ ID NO: 4788 - protein, 11 aa, Homo sapien
QAAAETLSEVA

SEQ ID NO: 4789 - protein, 9 aa, Homo sapien
QDLFGIWSK

SEQ ID NO: 4790 - protein, 11 aa, Homo sapien
QDLFGIWSKVY

SEQ ID NO: 4791 - protein, 10 aa, Homo sapien
QGMPEGDLVY

SEQ ID NO: 4792 - protein, 11 aa, Homo sapien
QIPSYKKLIMY

SEQ ID NO: 4793 - protein, 9 aa, Homo sapien
QIQSQWKEF

SEQ ID NO: 4794 - protein, 11 aa, Homo sapien
QIYVAAFTVQA

SEQ ID NO: 4795 - protein, 11 aa, Homo sapien
QLAGAKGVILY

SEQ ID NO: 4796 - protein, 11 aa, Homo sapien
QLAKQIQSQWK

SEQ ID NO: 4797 - protein, 8 aa, Homo sapien
QLGMEQHY

SEQ ID NO: 4798 - protein, 8 aa, Homo sapien
QLLYLPFR

SEQ ID NO: 4799 - protein, 8 aa, Homo sapien
QLMFLERA

SEQ ID NO: 4800 - protein, 9 aa, Homo sapien
QLMFLERAF

SEQ ID NO: 4801 - protein, 10 aa, Homo sapien
QLTQLGMEQH

SEQ ID NO: 4802 - protein, 11 aa, Homo sapien
QLTQLGMEQHY

SEQ ID NO: 4803 - protein, 8 aa, Homo sapien
QSGAAVVH

SEQ ID NO: 4804 - protein, 11 aa, Homo sapien
QSLRPDEDSSH

SEQ ID NO: 4805 - protein, 10 aa, Homo sapien
QVAVYSHGWA

SEQ ID NO: 4806 - protein, 11 aa, Homo sapien
QVAVYSHGWAH

SEQ ID NO: 4807 - protein, 9 aa, Homo sapien
QVFQVSHSF

SEQ ID NO: 4808 - protein, 11 aa, Homo sapien
QVFQVSHSFPH

SEQ ID NO: 4809 - protein, 9 aa, Homo sapien
QVHPQKVTK

SEQ ID NO: 4810 - protein, 10 aa, Homo sapien
QVHPQKVTKF

SEQ ID NO: 4811 - protein, 9 aa, Homo sapien
QVLVASRGR

SEQ ID NO: 4812 - protein, 10 aa, Homo sapien
QVLVASRGRA

SEQ ID NO: 4813 - protein, 8 aa, Homo sapien
QVRGGMVF

SEQ ID NO: 4814 - protein, 11 aa, Homo sapien
QVRGGMVFELA

SEQ ID NO: 4815 - protein, 8 aa, Homo sapien
QVSHSFPH

SEQ ID NO: 4816 - protein, 11 aa, Homo sapien
QVSHSFPHPLY

SEQ ID NO: 4817 - protein, 10 aa, Homo sapien
QVWLGRHNLF

SEQ ID NO: 4818 - protein, 11 aa, Homo sapien
QVYIRSTDVDR

SEQ ID NO: 4819 - protein, 8 aa, Homo sapien
RAAPLLLA

SEQ ID NO: 4820 - protein, 9 aa, Homo sapien
RAAPLLLAR

SEQ ID NO: 4821 - protein, 10 aa, Homo sapien
RAAPLLLARA

SEQ ID NO: 4822 - protein, 11 aa, Homo sapien
RAAPLLLARAA

SEQ ID NO: 4823 - protein, 9 aa, Homo sapien
RAASLSLGF

SEQ ID NO: 4824 - protein, 11 aa, Homo sapien
RAASLSLGFLF

SEQ ID NO: 4825 - protein, 8 aa, Homo sapien
RATQIPSY

SEQ ID NO: 4826 - protein, 9 aa, Homo sapien
RATQIPSYK

SEQ ID NO: 4827 - protein, 10 aa, Homo sapien
RATQIPSYKK

SEQ ID NO: 4828 - protein, 10 aa, Homo sapien
RAVCGGVLVH

SEQ ID NO: 4829 - protein, 10 aa, Homo sapien
RAYSEKVTEF

SEQ ID NO: 4830 - protein, 10 aa, Homo sapien
RDMKINCSGK

SEQ ID NO: 4831 - protein, 8 aa, Homo sapien
RDYAVVLR

SEQ ID NO: 4832 - protein, 9 aa, Homo sapien
RDYAVVLRK

SEQ ID NO: 4833 - protein, 10 aa, Homo sapien
RDYAVVLRKY

SEQ ID NO: 4834 - protein, 11 aa, Homo sapien
RDYAVVLRKYA

SEQ ID NO: 4835 - protein, 11 aa, Homo sapien
RFLRPGDDSSH

SEQ ID NO: 4836 - protein, 11 aa, Homo sapien
RFQELESETLK

SEQ ID NO: 4837 - protein, 8 aa, Homo sapien
RGAVEPDR

SEQ ID NO: 4838 - protein, 9 aa, Homo sapien
RGAVEPDRY

SEQ ID NO: 4839 - protein, 9 aa, Homo sapien
RGGMVFELA

SEQ ID NO: 4840 - protein, 10 aa, Homo sapien
RGNILNLNGA

SEQ ID NO: 4841 - protein, 8 aa, Homo sapien
RGNKVKNA

SEQ ID NO: 4842 - protein, 11 aa, Homo sapien
RGNKVKNAQLA

SEQ ID NO: 4843 - protein, 8 aa, Homo sapien
RGSLKVPY

SEQ ID NO: 4844 - protein, 8 aa, Homo sapien
RGVAYINA

SEQ ID NO: 4845 - protein, 11 aa, Homo sapien
RISKLGSGNDF

SEQ ID NO: 4846 - protein, 10 aa, Homo sapien
RIVGGWECEK

SEQ ID NO: 4847 - protein, 10 aa, Homo sapien
RIVGGWECEK

SEQ ID NO: 4848 - protein, 11 aa, Homo sapien
RIVGGWECEKH

SEQ ID NO: 4849 - protein, 11 aa, Homo sapien
RIVGGWECEKH

SEQ ID NO: 4850 - protein, 10 aa, Homo sapien
RIYNVIGTLR

SEQ ID NO: 4851 - protein, 8 aa, Homo sapien
RLGIASGR

SEQ ID NO: 4852 - protein, 9 aa, Homo sapien
RLGIASGRA

SEQ ID NO: 4853 - protein, 10 aa, Homo sapien
RLGIASGRAR

SEQ ID NO: 4854 - protein, 11 aa, Homo sapien
RLGIASGRARY

SEQ ID NO: 4855 - protein, 8 aa, Homo sapien
RLHPYKDF

SEQ ID NO: 4856 - protein, 10 aa, Homo sapien
RLHPYKDFIA

SEQ ID NO: 4857 - protein, 9 aa, Homo sapien
RLLQERGVA

SEQ ID NO: 4858 - protein, 10 aa, Homo sapien
RLLQERGVAY

SEQ ID NO: 4859 - protein, 11 aa, Homo sapien
RLSEPAELTDA

SEQ ID NO: 4860 - protein, 9 aa, Homo sapien
RMMNDQLMF

SEQ ID NO: 4861 - protein, 8 aa, Homo sapien
RSFGTLKK

SEQ ID NO: 4862 - protein, 9 aa, Homo sapien
RSLQCVSLH

SEQ ID NO: 4863 - protein, 9 aa, Homo sapien
RSVLAKELK

SEQ ID NO: 4864 - protein, 10 aa, Homo sapien
RSVLAKELKF

SEQ ID NO: 4865 - protein, 10 aa, Homo sapien
RTEDFFKLER

SEQ ID NO: 4866 - protein, 10 aa, Homo sapien
RTILFASWDA

SEQ ID NO: 4867 - protein, 11 aa, Homo sapien
RTLMSAMTNLA

SEQ ID NO: 4868 - protein, 9 aa, Homo sapien
RVDCTPLMY

SEQ ID NO: 4869 - protein, 8 aa, Homo sapien
RVPVSHSF

SEQ ID NO: 4870 - protein, 10 aa, Homo sapien
RVPVSHSFPH

SEQ ID NO: 4871 - protein, 8 aa, Homo sapien
SAMTNLAA

SEQ ID NO: 4872 - protein, 10 aa, Homo sapien
SAMTNLAALF

SEQ ID NO: 4873 - protein, 9 aa, Homo sapien
SAPPDSSWR

SEQ ID NO: 4874 - protein, 8 aa, Homo sapien
SAVATARR

SEQ ID NO: 4875 - protein, 10 aa, Homo sapien
SAVATARRPR

SEQ ID NO: 4876 - protein, 10 aa, Homo sapien
SAVKNFTEIA

SEQ ID NO: 4877 - protein, 8 aa, Homo sapien
SCHLTELY

SEQ ID NO: 4878 - protein, 9 aa, Homo sapien
SCHLTELYF

SEQ ID NO: 4879 - protein, 11 aa, Homo sapien
SCHLTELYFEK

SEQ ID NO: 4880 - protein, 8 aa, Homo sapien
SCPLERFA

SEQ ID NO: 4881 - protein, 9 aa, Homo sapien
SDIVPPFSA

SEQ ID NO: 4882 - protein, 10 aa, Homo sapien
SDIVPPFSAF

SEQ ID NO: 4883 - protein, 8 aa, Homo sapien
SDPADYFA

SEQ ID NO: 4884 - protein, 8 aa, Homo sapien
SFDSLFSA

SEQ ID NO: 4885 - protein, 10 aa, Homo sapien
SFDSLFSAVK

SEQ ID NO: 4886 - protein, 11 aa, Homo sapien
SFGTLKKEGWR

SEQ ID NO: 4887 - protein, 8 aa, Homo sapien
SFPGIYDA

SEQ ID NO: 4888 - protein, 10 aa, Homo sapien
SFPGIYDALF

SEQ ID NO: 4889 - protein, 11 aa, Homo sapien
SGAAVVHEIVR

SEQ ID NO: 4890 - protein, 8 aa, Homo sapien
SGKIVIAR

SEQ ID NO: 4891 - protein, 9 aa, Homo sapien
SGKIVIARY

SEQ ID NO: 4892 - protein, 11 aa, Homo sapien
SGKIVIARYGK

SEQ ID NO: 4893 - protein, 9 aa, Homo sapien
SGLHGQDLF

SEQ ID NO: 4894 - protein, 10 aa, Homo sapien
SGLQMALDVY

SEQ ID NO: 4895 - protein, 8 aa, Homo sapien
SGMPRISK

SEQ ID NO: 4896 - protein, 8 aa, Homo sapien
SGNDFEVF

SEQ ID NO: 4897 - protein, 9 aa, Homo sapien
SGNDFEVFF

SEQ ID NO: 4898 - protein, 11 aa, Homo sapien
SGNDFEVFFQR

SEQ ID NO: 4899 - protein, 8 aa, Homo sapien
SGRARYTK

SEQ ID NO: 4900 - protein, 11 aa, Homo sapien
SGWGSIEPEEF

SEQ ID NO: 4901 - protein, 11 aa, Homo sapien
SGWGSIEPEEF

SEQ ID NO: 4902 - protein, 10 aa, Homo sapien
SGYPLYHSVY

SEQ ID NO: 4903 - protein, 11 aa, Homo sapien
SIALSVGCTGA

SEQ ID NO: 4904 - protein, 9 aa, Homo sapien
SIEGNYTLR

SEQ ID NO: 4905 - protein, 9 aa, Homo sapien
SIEPEEFLR

SEQ ID NO: 4906 - protein, 11 aa, Homo sapien
SIEPEEFLRPR

SEQ ID NO: 4907 - protein, 11 aa, Homo sapien
SIEPEEFLTPK

SEQ ID NO: 4908 - protein, 11 aa, Homo sapien
SIINEDGNEIF

SEQ ID NO: 4909 - protein, 9 aa, Homo sapien
SIPVHPIGY

SEQ ID NO: 4910 - protein, 10 aa, Homo sapien
SIPVHPIGYY

SEQ ID NO: 4911 - protein, 11 aa, Homo sapien
SISMKHPQEMK

SEQ ID NO: 4912 - protein, 9 aa, Homo sapien
SIVLPFDCR

SEQ ID NO: 4913 - protein, 11 aa, Homo sapien
SIVLPFDCRDY

SEQ ID NO: 4914 - protein, 10 aa, Homo sapien
SLFEPPPPGY

SEQ ID NO: 4915 - protein, 9 aa, Homo sapien
SLFSAVKNF

SEQ ID NO: 4916 - protein, 9 aa, Homo sapien
SLGFLFLLF

SEQ ID NO: 4917 - protein, 10 aa, Homo sapien
SLGFLFLLFF

SEQ ID NO: 4918 - protein, 11 aa, Homo sapien
SLHLLSNDMCA

SEQ ID NO: 4919 - protein, 9 aa, Homo sapien
SLLKHQSLR

SEQ ID NO: 4920 - protein, 9 aa, Homo sapien
SLLKNRFLR

SEQ ID NO: 4921 - protein, 9 aa, Homo sapien
SLLSLYGIH

SEQ ID NO: 4922 - protein, 10 aa, Homo sapien
SLLSLYGIHK

SEQ ID NO: 4923 - protein, 8 aa, Homo sapien
SLQCVSLH

SEQ ID NO: 4924 - protein, 10 aa, Homo sapien
SLRPDEDSSH

SEQ ID NO: 4925 - protein, 8 aa, Homo sapien
SLSLGFLF

SEQ ID NO: 4926 - protein, 11 aa, Homo sapien
SLSLGFLFLLF

SEQ ID NO: 4927 - protein, 8 aa, Homo sapien
SLVHNLTK

SEQ ID NO: 4928 - protein, 11 aa, Homo sapien
SLVHNLTKELK

SEQ ID NO: 4929 - protein, 8 aa, Homo sapien
SLYESWTK

SEQ ID NO: 4930 - protein, 9 aa, Homo sapien
SLYESWTKK

SEQ ID NO: 4931 - protein, 9 aa, Homo sapien
SLYGIHKQK

SEQ ID NO: 4932 - protein, 11 aa, Homo sapien
SLYGIHKQKEK

SEQ ID NO: 4933 - protein, 8 aa, Homo sapien
SLYTKVVH

SEQ ID NO: 4934 - protein, 9 aa, Homo sapien
SLYTKVVHY

SEQ ID NO: 4935 - protein, 10 aa, Homo sapien
SLYTKVVHYR

SEQ ID NO: 4936 - protein, 11 aa, Homo sapien
SLYTKVVHYRK

SEQ ID NO: 4937 - protein, 9 aa, Homo sapien
SMKHPQEMK

SEQ ID NO: 4938 - protein, 11 aa, Homo sapien
SMKHPQEMKTY

SEQ ID NO: 4939 - protein, 9 aa, Homo sapien
SSHDLMLLR

SEQ ID NO: 4940 - protein, 9 aa, Homo sapien
SSHDLMLLR

SEQ ID NO: 4941 - protein, 11 aa, Homo sapien
SSHNKYAGESF

SEQ ID NO: 4942 - protein, 10 aa, Homo sapien
SSIEGNYTLR

SEQ ID NO: 4943 - protein, 11 aa, Homo sapien
SSNEATNITPK

SEQ ID NO: 4944 - protein, 8 aa, Homo sapien
SSWRGSLK

SEQ ID NO: 4945 - protein, 11 aa, Homo sapien
SSWRGSLKVPY

SEQ ID NO: 4946 - protein, 11 aa, Homo sapien
STDVDRTLMSA

SEQ ID NO: 4947 - protein, 10 aa, Homo sapien
STECMTTNSH

SEQ ID NO: 4948 - protein, 10 aa, Homo sapien
STEWAEENSR

SEQ ID NO: 4949 - protein, 9 aa, Homo sapien
STNEVTRIY

SEQ ID NO: 4950 - protein, 8 aa, Homo sapien
STQKVKMH

SEQ ID NO: 4951 - protein, 10 aa, Homo sapien
STQKVKMHIH

SEQ ID NO: 4952 - protein, 11 aa, Homo sapien
SVHNFTLPSWA

SEQ ID NO: 4953 - protein, 8 aa, Homo sapien
SVILLGRH

SEQ ID NO: 4954 - protein, 11 aa, Homo sapien
SVILLGRHSLF

SEQ ID NO: 4955 - protein, 8 aa, Homo sapien
SVLAKELK

SEQ ID NO: 4956 - protein, 9 aa, Homo sapien
SVLAKELKF

SEQ ID NO: 4957 - protein, 8 aa, Homo sapien
SVSFDSLF

SEQ ID NO: 4958 - protein, 10 aa, Homo sapien
SVSFDSLFSA

SEQ ID NO: 4959 - protein, 8 aa, Homo sapien
SVTWIGAA

SEQ ID NO: 4960 - protein, 11 aa, Homo sapien
SVYETYELVEK

SEQ ID NO: 4961 - protein, 9 aa, Homo sapien
TAAHCIRNK

SEQ ID NO: 4962 - protein, 8 aa, Homo sapien
TAAHCLKK

SEQ ID NO: 4963 - protein, 10 aa, Homo sapien
TARRPRWLCA

SEQ ID NO: 4964 - protein, 8 aa, Homo sapien
TDSAVATA

SEQ ID NO: 4965 - protein, 9 aa, Homo sapien
TDSAVATAR

SEQ ID NO: 4966 - protein, 10 aa, Homo sapien
TDSAVATARR

SEQ ID NO: 4967 - protein, 10 aa, Homo sapien
TDVDRTLMSA

SEQ ID NO: 4968 - protein, 8 aa, Homo sapien
TFPTDPIK

SEQ ID NO: 4969 - protein, 10 aa, Homo sapien
TGAVPLIQSR

SEQ ID NO: 4970 - protein, 8 aa, Homo sapien
TGNFSTQK

SEQ ID NO: 4971 - protein, 10 aa, Homo sapien
TGNFSTQKVK

SEQ ID NO: 4972 - protein, 9 aa, Homo sapien
TGQRVPVSH

SEQ ID NO: 4973 - protein, 11 aa, Homo sapien
TGQRVPVSHSF

SEQ ID NO: 4974 - protein, 9 aa, Homo sapien
TGQVFQVSH

SEQ ID NO: 4975 - protein, 11 aa, Homo sapien
TGQVFQVSHSF

SEQ ID NO: 4976 - protein, 9 aa, Homo sapien
TILFASWDA

SEQ ID NO: 4977 - protein, 9 aa, Homo sapien
TLGKLSGLH

SEQ ID NO: 4978 - protein, 8 aa, Homo sapien
TLKKEGWR

SEQ ID NO: 4979 - protein, 10 aa, Homo sapien
TLKKEGWRPR

SEQ ID NO: 4980 - protein, 11 aa, Homo sapien
TLKKEGWRPRR

SEQ ID NO: 4981 - protein, 9 aa, Homo sapien
TLKSEEFQK

SEQ ID NO: 4982 - protein, 10 aa, Homo sapien
TLKSEEFQKR

SEQ ID NO: 4983 - protein, 10 aa, Homo sapien
TLMSAMTNLA

SEQ ID NO: 4984 - protein, 11 aa, Homo sapien
TLMSAMTNLAA

SEQ ID NO: 4985 - protein, 10 aa, Homo sapien
TLRGAVEPDR

SEQ ID NO: 4986 - protein, 11 aa, Homo sapien
TLRGAVEPDRY

SEQ ID NO: 4987 - protein, 11 aa, Homo sapien
TLRVDCTPLMY

SEQ ID NO: 4988 - protein, 9 aa, Homo sapien
TLSVTWIGA

SEQ ID NO: 4989 - protein, 10 aa, Homo sapien
TLSVTWIGAA

SEQ ID NO: 4990 - protein, 9 aa, Homo sapien
TLVFRHGDR

SEQ ID NO: 4991 - protein, 11 aa, Homo sapien
TSLFEPPPPGY

SEQ ID NO: 4992 - protein, 9 aa, Homo sapien
TSWGPEPCA

SEQ ID NO: 4993 - protein, 9 aa, Homo sapien
TSWGSEPCA

SEQ ID NO: 4994 - protein, 9 aa, Homo sapien
TTVSGLQMA

SEQ ID NO: 4995 - protein, 11 aa, Homo sapien
TVAQVRGGMVF

SEQ ID NO: 4996 - protein, 11 aa, Homo sapien
TVPLSEDQLLY

SEQ ID NO: 4997 - protein, 8 aa, Homo sapien
TVSGLQMA

SEQ ID NO: 4998 - protein, 8 aa, Homo sapien
VAAFTVQA

SEQ ID NO: 4999 - protein, 9 aa, Homo sapien
VAAFTVQAA

SEQ ID NO: 5000 - protein, 10 aa, Homo sapien
VAAFTVQAAA

SEQ ID NO: 5001 - protein, 10 aa, Homo sapien
VAQVRGGMVF

SEQ ID NO: 5002 - protein, 8 aa, Homo sapien
VATARRPR

SEQ ID NO: 5003 - protein, 9 aa, Homo sapien
VAVYSHGWA

SEQ ID NO: 5004 - protein, 10 aa, Homo sapien
VAVYSHGWAH

SEQ ID NO: 5005 - protein, 9 aa, Homo sapien
VCAQVHPQK

SEQ ID NO: 5006 - protein, 8 aa, Homo sapien
VCGGVLVH

SEQ ID NO: 5007 - protein, 8 aa, Homo sapien
VDCTPLMY

SEQ ID NO: 5008 - protein, 11 aa, Homo sapien
VDPSKAWGEVK

SEQ ID NO: 5009 - protein, 8 aa, Homo sapien
VDRTLMSA

SEQ ID NO: 5010 - protein, 9 aa, Homo sapien
VFFQRLGIA

SEQ ID NO: 5011 - protein, 11 aa, Homo sapien
VFGGIDPQSGA

SEQ ID NO: 5012 - protein, 8 aa, Homo sapien
VFQVSHSF

SEQ ID NO: 5013 - protein, 10 aa, Homo sapien
VFQVSHSFPH

SEQ ID NO: 5014 - protein, 8 aa, Homo sapien
VFRGNKVK

SEQ ID NO: 5015 - protein, 10 aa, Homo sapien
VFRGNKVKNA

SEQ ID NO: 5016 - protein, 8 aa, Homo sapien
VGGWECEK

SEQ ID NO: 5017 - protein, 8 aa, Homo sapien
VGGWECEK

SEQ ID NO: 5018 - protein, 9 aa, Homo sapien
VGGWECEKH

SEQ ID NO: 5019 - protein, 9 aa, Homo sapien
VGGWECEKH

SEQ ID NO: 5020 - protein, 9 aa, Homo sapien
VGLPSIPVH

SEQ ID NO: 5021 - protein, 9 aa, Homo sapien
VGPGFTGNF

SEQ ID NO: 5022 - protein, 9 aa, Homo sapien
VIARYGKVF

SEQ ID NO: 5023 - protein, 10 aa, Homo sapien
VIARYGKVFR

SEQ ID NO: 5024 - protein, 8 aa, Homo sapien
VIGTLRGA

SEQ ID NO: 5025 - protein, 10 aa, Homo sapien
VILLGRHSLF

SEQ ID NO: 5026 - protein, 11 aa, Homo sapien
VILLGRHSLFH

SEQ ID NO: 5027 - protein, 8 aa, Homo sapien
VILYSDPA

SEQ ID NO: 5028 - protein, 10 aa, Homo sapien
VILYSDPADY

SEQ ID NO: 5029 - protein, 11 aa, Homo sapien
VILYSDPADYF

SEQ ID NO: 5030 - protein, 8 aa, Homo sapien
VISNDVCA

SEQ ID NO: 5031 - protein, 11 aa, Homo sapien
VISNDVCAQVH

SEQ ID NO: 5032 - protein, 8 aa, Homo sapien
VIYAPSSH

SEQ ID NO: 5033 - protein, 10 aa, Homo sapien
VIYAPSSHNK

SEQ ID NO: 5034 - protein, 11 aa, Homo sapien
VIYAPSSHNKY

SEQ ID NO: 5035 - protein, 11 aa, Homo sapien
VLAGGFFLLGF

SEQ ID NO: 5036 - protein, 8 aa, Homo sapien
VLAKELKF

SEQ ID NO: 5037 - protein, 10 aa, Homo sapien
VLGLPTQEPA

SEQ ID NO: 5038 - protein, 8 aa, Homo sapien
VLLSYPNK

SEQ ID NO: 5039 - protein, 10 aa, Homo sapien
VLLSYPNKTH

SEQ ID NO: 5040 - protein, 9 aa, Homo sapien
VLPFDCRDY

SEQ ID NO: 5041 - protein, 10 aa, Homo sapien
VLPFDCRDYA

SEQ ID NO: 5042 - protein, 8 aa, Homo sapien
VLRKYADK

SEQ ID NO: 5043 - protein, 10 aa, Homo sapien
VLRKYADKIY

SEQ ID NO: 5044 - protein, 11 aa, Homo sapien
VLRMMNDQLMF

SEQ ID NO: 5045 - protein, 9 aa, Homo sapien
VLTAAHCIR

SEQ ID NO: 5046 - protein, 11 aa, Homo sapien
VLTAAHCIRNK

SEQ ID NO: 5047 - protein, 9 aa, Homo sapien
VLTAAHCLK

SEQ ID NO: 5048 - protein, 10 aa, Homo sapien
VLTAAHCLKK

SEQ ID NO: 5049 - protein, 8 aa, Homo sapien
VLVASRGR

SEQ ID NO: 5050 - protein, 9 aa, Homo sapien
VLVASRGRA

SEQ ID NO: 5051 - protein, 11 aa, Homo sapien
VLVHPQWVLTA

SEQ ID NO: 5052 - protein, 11 aa, Homo sapien
VLVHPQWVLTA

SEQ ID NO: 5053 - protein, 9 aa, Homo sapien
VLVNEILNH

SEQ ID NO: 5054 - protein, 11 aa, Homo sapien
VLVNEILNHMK

SEQ ID NO: 5055 - protein, 10 aa, Homo sapien
VMDLPTQEPA

SEQ ID NO: 5056 - protein, 8 aa, Homo sapien
VSDIVPPF

SEQ ID NO: 5057 - protein, 10 aa, Homo sapien
VSDIVPPFSA

SEQ ID NO: 5058 - protein, 11 aa, Homo sapien
VSDIVPPFSAF

SEQ ID NO: 5059 - protein, 9 aa, Homo sapien
VSFDSLFSA

SEQ ID NO: 5060 - protein, 11 aa, Homo sapien
VSFDSLFSAVK

SEQ ID NO: 5061 - protein, 11 aa, Homo sapien
VSGLQMALDVY

SEQ ID NO: 5062 - protein, 10 aa, Homo sapien
VSHSFPHPLY

SEQ ID NO: 5063 - protein, 10 aa, Homo sapien
VSHSFPHPLY

SEQ ID NO: 5064 - protein, 8 aa, Homo sapien
VTEFMLCA

SEQ ID NO: 5065 - protein, 8 aa, Homo sapien
VTKFMLCA

SEQ ID NO: 5066 - protein, 10 aa, Homo sapien
VTKFMLCAGR

SEQ ID NO: 5067 - protein, 10 aa, Homo sapien
VTLVFRHGDR

SEQ ID NO: 5068 - protein, 9 aa, Homo sapien
VVHEIVRSF

SEQ ID NO: 5069 - protein, 9 aa, Homo sapien
VVHYRKWIK

SEQ ID NO: 5070 - protein, 9 aa, Homo sapien
VVHYRKWIK

SEQ ID NO: 5071 - protein, 9 aa, Homo sapien
VVLRKYADK

SEQ ID NO: 5072 - protein, 11 aa, Homo sapien
VVLRKYADKIY

SEQ ID NO: 5073 - protein, 10 aa, Homo sapien
WAHCGGVLVH

SEQ ID NO: 5074 - protein, 9 aa, Homo sapien
WATEDTMTK

SEQ ID NO: 5075 - protein, 11 aa, Homo sapien
WATEDTMTKLR

SEQ ID NO: 5076 - protein, 8 aa, Homo sapien
WDLVLSIA

SEQ ID NO: 5077 - protein, 9 aa, Homo sapien
WFIKSSNEA

SEQ ID NO: 5078 - protein, 9 aa, Homo sapien
WGEVKRQIY

SEQ ID NO: 5079 - protein, 11 aa, Homo sapien
WGEVKRQIYVA

SEQ ID NO: 5080 - protein, 11 aa, Homo sapien
WGPEPCALPEK

SEQ ID NO: 5081 - protein, 11 aa, Homo sapien
WGSEPCALPER

SEQ ID NO: 5082 - protein, 9 aa, Homo sapien
WGSIEPEEF

SEQ ID NO: 5083 - protein, 9 aa, Homo sapien
WGSIEPEEF

SEQ ID NO: 5084 - protein, 11 aa, Homo sapien
WGSIEPEEFLR

SEQ ID NO: 5085 - protein, 11 aa, Homo sapien
WIGAAPLILSR

SEQ ID NO: 5086 - protein, 8 aa, Homo sapien
WIKDTIAA

SEQ ID NO: 5087 - protein, 8 aa, Homo sapien
WIKDTIVA

SEQ ID NO: 5088 - protein, 10 aa, Homo sapien
WLCAGALVLA

SEQ ID NO: 5089 - protein, 8 aa, Homo sapien
WLDRSVLA

SEQ ID NO: 5090 - protein, 9 aa, Homo sapien
WLDRSVLAK

SEQ ID NO: 5091 - protein, 8 aa, Homo sapien
WLGRHNLF

SEQ ID NO: 5092 - protein, 9 aa, Homo sapien
WSKVYDPLY

SEQ ID NO: 5093 - protein, 11 aa, Homo sapien
WSTECMTTNSH

SEQ ID NO: 5094 - protein, 10 aa, Homo sapien
WTKKSPSPEF

SEQ ID NO: 5095 - protein, 10 aa, Homo sapien
WVLTAAHCIR

SEQ ID NO: 5096 - protein, 10 aa, Homo sapien
WVLTAAHCLK

SEQ ID NO: 5097 - protein, 11 aa, Homo sapien
WVLTAAHCLKK

SEQ ID NO: 5098 - protein, 11 aa, Homo sapien
YADKIYSISMK

SEQ ID NO: 5099 - protein, 10 aa, Homo sapien
YAGESFPGIY

SEQ ID NO: 5100 - protein, 8 aa, Homo sapien
YAPSSHNK

SEQ ID NO: 5101 - protein, 9 aa, Homo sapien
YAPSSHNKY

SEQ ID NO: 5102 - protein, 10 aa, Homo sapien
YAPSSHNKYA

SEQ ID NO: 5103 - protein, 8 aa, Homo sapien
YARTEDFF

SEQ ID NO: 5104 - protein, 9 aa, Homo sapien
YARTEDFFK

SEQ ID NO: 5105 - protein, 10 aa, Homo sapien
YASCHLTELY

SEQ ID NO: 5106 - protein, 11 aa, Homo sapien
YASCHLTELYF

SEQ ID NO: 5107 - protein, 8 aa, Homo sapien
YAVVLRKY

SEQ ID NO: 5108 - protein, 9 aa, Homo sapien
YAVVLRKYA

SEQ ID NO: 5109 - protein, 11 aa, Homo sapien
YAVVLRKYADK

SEQ ID NO: 5110 - protein, 8 aa, Homo sapien
YAYRRGIA

SEQ ID NO: 5111 - protein, 10 aa, Homo sapien
YAYRRGIAEA

SEQ ID NO: 5112 - protein, 8 aa, Homo sapien
YCESVHNF

SEQ ID NO: 5113 - protein, 10 aa, Homo sapien
YDALFDIESK

SEQ ID NO: 5114 - protein, 9 aa, Homo sapien
YDAQKLLEK

SEQ ID NO: 5115 - protein, 9 aa, Homo sapien
YDMSLLKNR

SEQ ID NO: 5116 - protein, 10 aa, Homo sapien
YDMSLLKNRF

SEQ ID NO: 5117 - protein, 10 aa, Homo sapien
YDPLYCESVH

SEQ ID NO: 5118 - protein, 8 aa, Homo sapien
YDPMFKYH

SEQ ID NO: 5119 - protein, 10 aa, Homo sapien
YDVLLSYPNK

SEQ ID NO: 5120 - protein, 9 aa, Homo sapien
YFAPGVKSY

SEQ ID NO: 5121 - protein, 8 aa, Homo sapien
YFEKGEYF

SEQ ID NO: 5122 - protein, 8 aa, Homo sapien
YFVEMYYR

SEQ ID NO: 5123 - protein, 9 aa, Homo sapien
YGIHKQKEK

SEQ ID NO: 5124 - protein, 11 aa, Homo sapien
YGIHKQKEKSR

SEQ ID NO: 5125 - protein, 9 aa, Homo sapien
YGKVFRGNK

SEQ ID NO: 5126 - protein, 11 aa, Homo sapien
YGKVFRGNKVK

SEQ ID NO: 5127 - protein, 8 aa, Homo sapien
YIRKRYRK

SEQ ID NO: 5128 - protein, 9 aa, Homo sapien
YIRKRYRKF

SEQ ID NO: 5129 - protein, 9 aa, Homo sapien
YIRSTDVDR

SEQ ID NO: 5130 - protein, 9 aa, Homo sapien
YLPFRNCPR

SEQ ID NO: 5131 - protein, 10 aa, Homo sapien
YLPFRNCPRF

SEQ ID NO: 5132 - protein, 8 aa, Homo sapien
YSDPADYF

SEQ ID NO: 5133 - protein, 9 aa, Homo sapien
YSDPADYFA

SEQ ID NO: 5134 - protein, 8 aa, Homo sapien
YSEKVTEF

SEQ ID NO: 5135 - protein, 9 aa, Homo sapien
YSLVHNLTK

SEQ ID NO: 5136 - protein, 9 aa, Homo sapien
YSVSFDSLF

SEQ ID NO: 5137 - protein, 11 aa, Homo sapien
YSVSFDSLFSA

SEQ ID NO: 5138 - protein, 9 aa, Homo sapien
YTKNWETNK

SEQ ID NO: 5139 - protein, 10 aa, Homo sapien
YTKNWETNKF

SEQ ID NO: 5140 - protein, 8 aa, Homo sapien
YTKVVHYR

SEQ ID NO: 5141 - protein, 8 aa, Homo sapien
YTKVVHYR

SEQ ID NO: 5142 - protein, 9 aa, Homo sapien
YTKVVHYRK

SEQ ID NO: 5143 - protein, 9 aa, Homo sapien
YTKVVHYRK

SEQ ID NO: 5144 - protein, 9 aa, Homo sapien
YVAAFTVQA

SEQ ID NO: 5145 - protein, 10 aa, Homo sapien
YVAAFTVQAA

SEQ ID NO: 5146 - protein, 11 aa, Homo sapien
YVAAFTVQAAA

SEQ ID NO: 5147 - protein, 8 aa, Homo sapien
YVILGGHR

SEQ ID NO: 5148 - protein, 10 aa, Homo sapien
YVNYARTEDF

SEQ ID NO: 5149 - protein, 11 aa, Homo sapien
YVNYARTEDFF

SEQ ID NO: 5150 - protein, 8 aa, Homo sapien
AAHCIRNK

SEQ ID NO: 5151 - protein, 8 aa, Homo sapien
AAPLILSR

SEQ ID NO: 5152 - protein, 8 aa, Homo sapien
AAPLLLAR

SEQ ID NO: 5153 - protein, 9 aa, Homo sapien
AAVVHEIVR

SEQ ID NO: 5154 - protein, 10 aa, Homo sapien
ADKIYSISMK

SEQ ID NO: 5155 - protein, 11 aa, Homo sapien
ADKIYSISMKH

SEQ ID NO: 5156 - protein, 9 aa, Homo sapien
ADSSIEGNY

SEQ ID NO: 5157 - protein, 9 aa, Homo sapien
ADYFAPGVK

SEQ ID NO: 5158 - protein, 11 aa, Homo sapien
ADYFAPGVKSY

SEQ ID NO: 5159 - protein, 11 aa, Homo sapien
AFIDPLGLPDR

SEQ ID NO: 5160 - protein, 9 aa, Homo sapien
AGAKGVILY

SEQ ID NO: 5161 - protein, 9 aa, Homo sapien
AGDPLTPGY

SEQ ID NO: 5162 - protein, 9 aa, Homo sapien
AGESFPGIY

SEQ ID NO: 5163 - protein, 8 aa, Homo sapien
AGLWTGGK

SEQ ID NO: 5164 - protein, 8 aa, Homo sapien
AGRWTGGK

SEQ ID NO: 5165 - protein, 11 aa, Homo sapien
AGTEQNFQLAK

SEQ ID NO: 5166 - protein, 8 aa, Homo sapien
ALFDIESK

SEQ ID NO: 5167 - protein, 9 aa, Homo sapien
ALPEKPAVY

SEQ ID NO: 5168 - protein, 11 aa, Homo sapien
ALPEKPAVYTK

SEQ ID NO: 5169 - protein, 9 aa, Homo sapien
ALPERPSLY

SEQ ID NO: 5170 - protein, 11 aa, Homo sapien
ALPERPSLYTK

SEQ ID NO: 5171 - protein, 8 aa, Homo sapien
ANEYAYRR

SEQ ID NO: 5172 - protein, 11 aa, Homo sapien
ANSIVLPFDCR

SEQ ID NO: 5173 - protein, 9 aa, Homo sapien
ASCHLTELY

SEQ ID NO: 5174 - protein, 9 aa, Homo sapien
ASGRARYTK

SEQ ID NO: 5175 - protein, 8 aa, Homo sapien
ATEDTMTK

SEQ ID NO: 5176 - protein, 10 aa, Homo sapien
ATEDTMTKLR

SEQ ID NO: 5177 - protein, 10 aa, Homo sapien
ATLGKLSGLH

SEQ ID NO: 5178 - protein, 8 aa, Homo sapien
ATNITPKH

SEQ ID NO: 5179 - protein, 11 aa, Homo sapien
ATNITPKHNMK

SEQ ID NO: 5180 - protein, 8 aa, Homo sapien
ATQIPSYK

SEQ ID NO: 5181 - protein, 9 aa, Homo sapien
ATQIPSYKK

SEQ ID NO: 5182 - protein, 9 aa, Homo sapien
AVATARRPR

SEQ ID NO: 5183 - protein, 9 aa, Homo sapien
AVCGGVLVH

SEQ ID NO: 5184 - protein, 10 aa, Homo sapien
AVGLPSIPVH

SEQ ID NO: 5185 - protein, 11 aa, Homo sapien
AVKNFTEIASK

SEQ ID NO: 5186 - protein, 8 aa, Homo sapien
AVPLIQSR

SEQ ID NO: 5187 - protein, 8 aa, Homo sapien
AVVHEIVR

SEQ ID NO: 5188 - protein, 10 aa, Homo sapien
AVVLRKYADK

SEQ ID NO: 5189 - protein, 9 aa, Homo sapien
AVYSHGWAH

SEQ ID NO: 5190 - protein, 8 aa, Homo sapien
AVYTKVVH

SEQ ID NO: 5191 - protein, 9 aa, Homo sapien
AVYTKVVHY

SEQ ID NO: 5192 - protein, 10 aa, Homo sapien
AVYTKVVHYR

SEQ ID NO: 5193 - protein, 11 aa, Homo sapien
AVYTKVVHYRK

SEQ ID NO: 5194 - protein, 9 aa, Homo sapien
CAGLWTGGK

SEQ ID NO: 5195 - protein, 9 aa, Homo sapien
CAGRWTGGK

SEQ ID NO: 5196 - protein, 10 aa, Homo sapien
CALPEKPAVY

SEQ ID NO: 5197 - protein, 10 aa, Homo sapien
CALPERPSLY

SEQ ID NO: 5198 - protein, 8 aa, Homo sapien
CAQVHPQK

SEQ ID NO: 5199 - protein, 11 aa, Homo sapien
CAQVHPQKVTK

SEQ ID NO: 5200 - protein, 8 aa, Homo sapien
CARAYSEK

SEQ ID NO: 5201 - protein, 9 aa, Homo sapien
CSGKIVIAR

SEQ ID NO: 5202 - protein, 10 aa, Homo sapien
CSGKIVIARY

SEQ ID NO: 5203 - protein, 9 aa, Homo sapien
CSPSCPLER

SEQ ID NO: 5204 - protein, 11 aa, Homo sapien
CTGAVPLIQSR

SEQ ID NO: 5205 - protein, 10 aa, Homo sapien
CTPLMYSLVH

SEQ ID NO: 5206 - protein, 9 aa, Homo sapien
DALFDIESK

SEQ ID NO: 5207 - protein, 8 aa, Homo sapien
DAQKLLEK

SEQ ID NO: 5208 - protein, 10 aa, Homo sapien
DCRDYAVVLR

SEQ ID NO: 5209 - protein, 11 aa, Homo sapien
DCRDYAVVLRK

SEQ ID NO: 5210 - protein, 11 aa, Homo sapien
DCTPLMYSLVH

SEQ ID NO: 5211 - protein, 11 aa, Homo sapien
DDSSHDLMLLR

SEQ ID NO: 5212 - protein, 11 aa, Homo sapien
DFDKSNPIVLR

SEQ ID NO: 5213 - protein, 8 aa, Homo sapien
DFEVFFQR

SEQ ID NO: 5214 - protein, 10 aa, Homo sapien
DFFKLERDMK

SEQ ID NO: 5215 - protein, 8 aa, Homo sapien
DFIATLGK

SEQ ID NO: 5216 - protein, 10 aa, Homo sapien
DIESKVDPSK

SEQ ID NO: 5217 - protein, 8 aa, Homo sapien
DLFGIWSK

SEQ ID NO: 5218 - protein, 10 aa, Homo sapien
DLFGIWSKVY

SEQ ID NO: 5219 - protein, 9 aa, Homo sapien
DLVYVNYAR

SEQ ID NO: 5220 - protein, 10 aa, Homo sapien
DMCARAYSEK

SEQ ID NO: 5221 - protein, 9 aa, Homo sapien
DMKINCSGK

SEQ ID NO: 5222 - protein, 8 aa, Homo sapien
DMSLLKNR

SEQ ID NO: 5223 - protein, 11 aa, Homo sapien
DMSLLKNRFLR

SEQ ID NO: 5224 - protein, 8 aa, Homo sapien
DSAVATAR

SEQ ID NO: 5225 - protein, 9 aa, Homo sapien
DSAVATARR

SEQ ID NO: 5226 - protein, 11 aa, Homo sapien
DSAVATARRPR

SEQ ID NO: 5227 - protein, 8 aa, Homo sapien
DSLFSAVK

SEQ ID NO: 5228 - protein, 10 aa, Homo sapien
DSSHDLMLLR

SEQ ID NO: 5229 - protein, 10 aa, Homo sapien
DSSHDLMLLR

SEQ ID NO: 5230 - protein, 8 aa, Homo sapien
DSSIEGNY

SEQ ID NO: 5231 - protein, 11 aa, Homo sapien
DSSIEGNYTLR

SEQ ID NO: 5232 - protein, 9 aa, Homo sapien
DSSWRGSLK

SEQ ID NO: 5233 - protein, 8 aa, Homo sapien
DSVELAHY

SEQ ID NO: 5234 - protein, 9 aa, Homo sapien
DTFPTDPIK

SEQ ID NO: 5235 - protein, 10 aa, Homo sapien
DTGQRVPVSH

SEQ ID NO: 5236 - protein, 10 aa, Homo sapien
DTGQVFQVSH

SEQ ID NO: 5237 - protein, 10 aa, Homo sapien
DVCAQVHPQK

SEQ ID NO: 5238 - protein, 9 aa, Homo sapien
DVLLSYPNK

SEQ ID NO: 5239 - protein, 11 aa, Homo sapien
DVLLSYPNKTH

SEQ ID NO: 5240 - protein, 10 aa, Homo sapien
DVYNGLLPPY

SEQ ID NO: 5241 - protein, 8 aa, Homo sapien
EATNITPK

SEQ ID NO: 5242 - protein, 9 aa, Homo sapien
EATNITPKH

SEQ ID NO: 5243 - protein, 11 aa, Homo sapien
EAVGLPSIPVH

SEQ ID NO: 5244 - protein, 8 aa, Homo sapien
ECMTTNSH

SEQ ID NO: 5245 - protein, 8 aa, Homo sapien
EDFFKLER

SEQ ID NO: 5246 - protein, 11 aa, Homo sapien
EDFFKLERDMK

SEQ ID NO: 5247 - protein, 10 aa, Homo sapien
EDQLLYLPFR

SEQ ID NO: 5248 - protein, 11 aa, Homo sapien
EDSSHDLMLLR

SEQ ID NO: 5249 - protein, 11 aa, Homo sapien
EDTGQRVPVSH

SEQ ID NO: 5250 - protein, 11 aa, Homo sapien
EDTGQVFQVSH

SEQ ID NO: 5251 - protein, 8 aa, Homo sapien
EDTMTKLR

SEQ ID NO: 5252 - protein, 11 aa, Homo sapien
EFGLDSVELAH

SEQ ID NO: 5253 - protein, 9 aa, Homo sapien
EFQKRLHPY

SEQ ID NO: 5254 - protein, 10 aa, Homo sapien
EFQKRLHPYK

SEQ ID NO: 5255 - protein, 10 aa, Homo sapien
EFSGMPRISK

SEQ ID NO: 5256 - protein, 9 aa, Homo sapien
EGDLVYVNY

SEQ ID NO: 5257 - protein, 11 aa, Homo sapien
EGDLVYVNYAR

SEQ ID NO: 5258 - protein, 9 aa, Homo sapien
EGFEGKSLY

SEQ ID NO: 5259 - protein, 11 aa, Homo sapien
EGKSLYESWTK

SEQ ID NO: 5260 - protein, 9 aa, Homo sapien
EIASKFSER

SEQ ID NO: 5261 - protein, 8 aa, Homo sapien
EILNHMKR

SEQ ID NO: 5262 - protein, 10 aa, Homo sapien
EIVRSFGTLK

SEQ ID NO: 5263 - protein, 11 aa, Homo sapien
EIVRSFGTLKK

SEQ ID NO: 5264 - protein, 11 aa, Homo sapien
ELAHYDVLLSY

SEQ ID NO: 5265 - protein, 8 aa, Homo sapien
ELESETLK

SEQ ID NO: 5266 - protein, 8 aa, Homo sapien
ELGEYIRK

SEQ ID NO: 5267 - protein, 9 aa, Homo sapien
ELGEYIRKR

SEQ ID NO: 5268 - protein, 10 aa, Homo sapien
ELGEYIRKRY

SEQ ID NO: 5269 - protein, 11 aa, Homo sapien
ELGEYIRKRYR

SEQ ID NO: 5270 - protein, 8 aa, Homo sapien
ELKAENIK

SEQ ID NO: 5271 - protein, 9 aa, Homo sapien
ELKAENIKK

SEQ ID NO: 5272 - protein, 10 aa, Homo sapien
ELKFVTLVFR

SEQ ID NO: 5273 - protein, 11 aa, Homo sapien
ELKFVTLVFRH

SEQ ID NO: 5274 - protein, 11 aa, Homo sapien
ELSELSLLSLY

SEQ ID NO: 5275 - protein, 8 aa, Homo sapien
ELSLLSLY

SEQ ID NO: 5276 - protein, 11 aa, Homo sapien
ELSLLSLYGIH

SEQ ID NO: 5277 - protein, 9 aa, Homo sapien
ELYFEKGEY

SEQ ID NO: 5278 - protein, 10 aa, Homo sapien
EMYYRNETQH

SEQ ID NO: 5279 - protein, 8 aa, Homo sapien
ENIKKFLY

SEQ ID NO: 5280 - protein, 9 aa, Homo sapien
ENSRLLQER

SEQ ID NO: 5281 - protein, 8 aa, Homo sapien
ESKVDPSK

SEQ ID NO: 5282 - protein, 9 aa, Homo sapien
ESYKHEQVY

SEQ ID NO: 5283 - protein, 11 aa, Homo sapien
ESYKHEQVYIR

SEQ ID NO: 5284 - protein, 10 aa, Homo sapien
ETDSAVATAR

SEQ ID NO: 5285 - protein, 11 aa, Homo sapien
ETDSAVATARR

SEQ ID NO: 5286 - protein, 10 aa, Homo sapien
ETLKSEEFQK

SEQ ID NO: 5287 - protein, 11 aa, Homo sapien
ETLKSEEFQKR

SEQ ID NO: 5288 - protein, 8 aa, Homo sapien
ETNKFSGY

SEQ ID NO: 5289 - protein, 11 aa, Homo sapien
ETNKFSGYPLY

SEQ ID NO: 5290 - protein, 8 aa, Homo sapien
ETYELVEK

SEQ ID NO: 5291 - protein, 10 aa, Homo sapien
ETYELVEKFY

SEQ ID NO: 5292 - protein, 8 aa, Homo sapien
FAPGVKSY

SEQ ID NO: 5293 - protein, 11 aa, Homo sapien
FDCRDYAVVLR

SEQ ID NO: 5294 - protein, 11 aa, Homo sapien
FDIESKVDPSK

SEQ ID NO: 5295 - protein, 10 aa, Homo sapien
FDKSNPIVLR

SEQ ID NO: 5296 - protein, 9 aa, Homo sapien
FDSLFSAVK

SEQ ID NO: 5297 - protein, 9 aa, Homo sapien
FFKLERDMK

SEQ ID NO: 5298 - protein, 11 aa, Homo sapien
FFQRLGIASGR

SEQ ID NO: 5299 - protein, 11 aa, Homo sapien
FFWLDRSVLAK

SEQ ID NO: 5300 - protein, 8 aa, Homo sapien
FGIWSKVY

SEQ ID NO: 5301 - protein, 10 aa, Homo sapien
FGLDSVELAH

SEQ ID NO: 5302 - protein, 11 aa, Homo sapien
FGLDSVELAHY

SEQ ID NO: 5303 - protein, 10 aa, Homo sapien
FGTLKKEGWR

SEQ ID NO: 5304 - protein, 10 aa, Homo sapien
FIDPLGLPDR

SEQ ID NO: 5305 - protein, 11 aa, Homo sapien
FLDELKAENIK

SEQ ID NO: 5306 - protein, 8 aa, Homo sapien
FLFGWFIK

SEQ ID NO: 5307 - protein, 11 aa, Homo sapien
FLFLLFFWLDR

SEQ ID NO: 5308 - protein, 9 aa, Homo sapien
FLLFFWLDR

SEQ ID NO: 5309 - protein, 8 aa, Homo sapien
FLNESYKH

SEQ ID NO: 5310 - protein, 10 aa, Homo sapien
FLRPGDDSSH

SEQ ID NO: 5311 - protein, 10 aa, Homo sapien
FLYNFTQIPH

SEQ ID NO: 5312 - protein, 10 aa, Homo sapien
FSERLQDFDK

SEQ ID NO: 5313 - protein, 9 aa, Homo sapien
FSGMPRISK

SEQ ID NO: 5314 - protein, 8 aa, Homo sapien
FSGYPLYH

SEQ ID NO: 5315 - protein, 11 aa, Homo sapien
FSGYPLYHSVY

SEQ ID NO: 5316 - protein, 9 aa, Homo sapien
FSTQKVKMH

SEQ ID NO: 5317 - protein, 11 aa, Homo sapien
FSTQKVKMHIH

SEQ ID NO: 5318 - protein, 11 aa, Homo sapien
FTEIASKFSER

SEQ ID NO: 5319 - protein, 9 aa, Homo sapien
FTGNFSTQK

SEQ ID NO: 5320 - protein, 11 aa, Homo sapien
FTGNFSTQKVK

SEQ ID NO: 5321 - protein, 8 aa, Homo sapien
FVTLVFRH

SEQ ID NO: 5322 - protein, 11 aa, Homo sapien
FVTLVFRHGDR

SEQ ID NO: 5323 - protein, 9 aa, Homo sapien
GAAPLILSR

SEQ ID NO: 5324 - protein, 10 aa, Homo sapien
GAAVVHEIVR

SEQ ID NO: 5325 - protein, 10 aa, Homo sapien
GAGDPLTPGY

SEQ ID NO: 5326 - protein, 8 aa, Homo sapien
GAKGVILY

SEQ ID NO: 5327 - protein, 8 aa, Homo sapien
GAVEPDRY

SEQ ID NO: 5328 - protein, 9 aa, Homo sapien
GAVPLIQSR

SEQ ID NO: 5329 - protein, 10 aa, Homo sapien
GCSPSCPLER

SEQ ID NO: 5330 - protein, 8 aa, Homo sapien
GDLVYVNY

SEQ ID NO: 5331 - protein, 10 aa, Homo sapien
GDLVYVNYAR

SEQ ID NO: 5332 - protein, 8 aa, Homo sapien
GDPLTPGY

SEQ ID NO: 5333 - protein, 8 aa, Homo sapien
GFEGKSLY

SEQ ID NO: 5334 - protein, 9 aa, Homo sapien
GFLFGWFIK

SEQ ID NO: 5335 - protein, 10 aa, Homo sapien
GFTGNFSTQK

SEQ ID NO: 5336 - protein, 11 aa, Homo sapien
GGSAPPDSSWR

SEQ ID NO: 5337 - protein, 11 aa, Homo sapien
GGVLVNEILNH

SEQ ID NO: 5338 - protein, 8 aa, Homo sapien
GGWECEKH

SEQ ID NO: 5339 - protein, 8 aa, Homo sapien
GGWECEKH

SEQ ID NO: 5340 - protein, 8 aa, Homo sapien
GIASGRAR

SEQ ID NO: 5341 - protein, 9 aa, Homo sapien
GIASGRARY

SEQ ID NO: 5342 - protein, 11 aa, Homo sapien
GIASGRARYTK

SEQ ID NO: 5343 - protein, 8 aa, Homo sapien
GIHKQKEK

SEQ ID NO: 5344 - protein, 10 aa, Homo sapien
GIHKQKEKSR

SEQ ID NO: 5345 - protein, 11 aa, Homo sapien
GIWSKVYDPLY

SEQ ID NO: 5346 - protein, 9 aa, Homo sapien
GLDSVELAH

SEQ ID NO: 5347 - protein, 10 aa, Homo sapien
GLDSVELAHY

SEQ ID NO: 5348 - protein, 10 aa, Homo sapien
GLLPPYASCH

SEQ ID NO: 5349 - protein, 8 aa, Homo sapien
GLPDRPFY

SEQ ID NO: 5350 - protein, 9 aa, Homo sapien
GLPDRPFYR

SEQ ID NO: 5351 - protein, 10 aa, Homo sapien
GLPDRPFYRH

SEQ ID NO: 5352 - protein, 8 aa, Homo sapien
GLPSIPVH

SEQ ID NO: 5353 - protein, 9 aa, Homo sapien
GLQMALDVY

SEQ ID NO: 5354 - protein, 11 aa, Homo sapien
GMEQHYELGEY

SEQ ID NO: 5355 - protein, 9 aa, Homo sapien
GMPEGDLVY

SEQ ID NO: 5356 - protein, 10 aa, Homo sapien
GNDFEVFFQR

SEQ ID NO: 5357 - protein, 9 aa, Homo sapien
GNFSTQKVK

SEQ ID NO: 5358 - protein, 11 aa, Homo sapien
GNFSTQKVKMH

SEQ ID NO: 5359 - protein, 10 aa, Homo sapien
GSAPPDSSWR

SEQ ID NO: 5360 - protein, 10 aa, Homo sapien
GSEPCALPER

SEQ ID NO: 5361 - protein, 10 aa, Homo sapien
GSIEPEEFLR

SEQ ID NO: 5362 - protein, 11 aa, Homo sapien
GSTEWAEENSR

SEQ ID NO: 5363 - protein, 10 aa, Homo sapien
GTEQNFQLAK

SEQ ID NO: 5364 - protein, 9 aa, Homo sapien
GTLKKEGWR

SEQ ID NO: 5365 - protein, 11 aa, Homo sapien
GTLKKEGWRPR

SEQ ID NO: 5366 - protein, 11 aa, Homo sapien
GTLRGAVEPDR

SEQ ID NO: 5367 - protein, 11 aa, Homo sapien
GVILYSDPADY

SEQ ID NO: 5368 - protein, 10 aa, Homo sapien
GVLVNEILNH

SEQ ID NO: 5369 - protein, 8 aa, Homo sapien
HCGGVLVH

SEQ ID NO: 5370 - protein, 11 aa, Homo sapien
HGQDLFGIWSK

SEQ ID NO: 5371 - protein, 10 aa, Homo sapien
HIHSTNEVTR

SEQ ID NO: 5372 - protein, 10 aa, Homo sapien
HLLSNDMCAR

SEQ ID NO: 5373 - protein, 9 aa, Homo sapien
HLTELYFEK

SEQ ID NO: 5374 - protein, 8 aa, Homo sapien
HLTVAQVR

SEQ ID NO: 5375 - protein, 11 aa, Homo sapien
HMKRATQIPSY

SEQ ID NO: 5376 - protein, 8 aa, Homo sapien
HNLTKELK

SEQ ID NO: 5377 - protein, 11 aa, Homo sapien
HNMKAFLDELK

SEQ ID NO: 5378 - protein, 8 aa, Homo sapien
HSFPHPLY

SEQ ID NO: 5379 - protein, 8 aa, Homo sapien
HSFPHPLY

SEQ ID NO: 5380 - protein, 10 aa, Homo sapien
HSQPWQVAVY

SEQ ID NO: 5381 - protein, 8 aa, Homo sapien
HSTNEVTR

SEQ ID NO: 5382 - protein, 10 aa, Homo sapien
HSTNEVTRIY

SEQ ID NO: 5383 - protein, 9 aa, Homo sapien
HVIYAPSSH

SEQ ID NO: 5384 - protein, 11 aa, Homo sapien
HVIYAPSSHNK

SEQ ID NO: 5385 - protein, 9 aa, Homo sapien
IARYGKVFR

SEQ ID NO: 5386 - protein, 8 aa, Homo sapien
IASGRARY

SEQ ID NO: 5387 - protein, 10 aa, Homo sapien
IASGRARYTK

SEQ ID NO: 5388 - protein, 8 aa, Homo sapien
IASKFSER

SEQ ID NO: 5389 - protein, 11 aa, Homo sapien
IATLGKLSGLH

SEQ ID NO: 5390 - protein, 9 aa, Homo sapien
IDPLGLPDR

SEQ ID NO: 5391 - protein, 11 aa, Homo sapien
IDPQSGAAVVH

SEQ ID NO: 5392 - protein, 10 aa, Homo sapien
IDTFPTDPIK

SEQ ID NO: 5393 - protein, 10 aa, Homo sapien
IGAAPLILSR

SEQ ID NO: 5394 - protein, 8 aa, Homo sapien
IGYYDAQK

SEQ ID NO: 5395 - protein, 10 aa, Homo sapien
ILLGRHSLFH

SEQ ID NO: 5396 - protein, 10 aa, Homo sapien
ILLWQPIPVH

SEQ ID NO: 5397 - protein, 9 aa, Homo sapien
ILYSDPADY

SEQ ID NO: 5398 - protein, 11 aa, Homo sapien
INADSSIEGNY

SEQ ID NO: 5399 - protein, 11 aa, Homo sapien
INCSGKIVIAR

SEQ ID NO: 5400 - protein, 10 aa, Homo sapien
ISMKHPQEMK

SEQ ID NO: 5401 - protein, 10 aa, Homo sapien
ISNDVCAQVH

SEQ ID NO: 5402 - protein, 8 aa, Homo sapien
ITPKHNMK

SEQ ID NO: 5403 - protein, 9 aa, Homo sapien
IVGGWECEK

SEQ ID NO: 5404 - protein, 9 aa, Homo sapien
IVGGWECEK

SEQ ID NO: 5405 - protein, 10 aa, Homo sapien
IVGGWECEKH

SEQ ID NO: 5406 - protein, 10 aa, Homo sapien
IVGGWECEKH

SEQ ID NO: 5407 - protein, 8 aa, Homo sapien
IVIARYGK

SEQ ID NO: 5408 - protein, 11 aa, Homo sapien
IVIARYGKVFR

SEQ ID NO: 5409 - protein, 8 aa, Homo sapien
IVLPFDCR

SEQ ID NO: 5410 - protein, 10 aa, Homo sapien
IVLPFDCRDY

SEQ ID NO: 5411 - protein, 9 aa, Homo sapien
IVRSFGTLK

SEQ ID NO: 5412 - protein, 10 aa, Homo sapien
IVRSFGTLKK

SEQ ID NO: 5413 - protein, 10 aa, Homo sapien
KAENIKKFLY

SEQ ID NO: 5414 - protein, 8 aa, Homo sapien
KAFLDELK

SEQ ID NO: 5415 - protein, 8 aa, Homo sapien
KAWGEVKR

SEQ ID NO: 5416 - protein, 11 aa, Homo sapien
KAWGEVKRQIY

SEQ ID NO: 5417 - protein, 9 aa, Homo sapien
KDFIATLGK

SEQ ID NO: 5418 - protein, 8 aa, Homo sapien
KFLNESYK

SEQ ID NO: 5419 - protein, 9 aa, Homo sapien
KFLNESYKH

SEQ ID NO: 5420 - protein, 11 aa, Homo sapien
KFLYNFTQIPH

SEQ ID NO: 5421 - protein, 8 aa, Homo sapien
KFMLCAGR

SEQ ID NO: 5422 - protein, 11 aa, Homo sapien
KFSERLQDFDK

SEQ ID NO: 5423 - protein, 8 aa, Homo sapien
KFSGYPLY

SEQ ID NO: 5424 - protein, 9 aa, Homo sapien
KFSGYPLYH

SEQ ID NO: 5425 - protein, 8 aa, Homo sapien
KFVTLVFR

SEQ ID NO: 5426 - protein, 9 aa, Homo sapien
KFVTLVFRH

SEQ ID NO: 5427 - protein, 8 aa, Homo sapien
KFYDPMFK

SEQ ID NO: 5428 - protein, 9 aa, Homo sapien
KFYDPMFKY

SEQ ID NO: 5429 - protein, 10 aa, Homo sapien
KFYDPMFKYH

SEQ ID NO: 5430 - protein, 9 aa, Homo sapien
KGEYFVEMY

SEQ ID NO: 5431 - protein, 10 aa, Homo sapien
KGEYFVEMYY

SEQ ID NO: 5432 - protein, 11 aa, Homo sapien
KGEYFVEMYYR

SEQ ID NO: 5433 - protein, 9 aa, Homo sapien
KIVIARYGK

SEQ ID NO: 5434 - protein, 8 aa, Homo sapien
KIYSISMK

SEQ ID NO: 5435 - protein, 9 aa, Homo sapien
KIYSISMKH

SEQ ID NO: 5436 - protein, 8 aa, Homo sapien
KLIMYSAH

SEQ ID NO: 5437 - protein, 8 aa, Homo sapien
KLQCVDLH

SEQ ID NO: 5438 - protein, 9 aa, Homo sapien
KNAQLAGAK

SEQ ID NO: 5439 - protein, 9 aa, Homo sapien
KNFTEIASK

SEQ ID NO: 5440 - protein, 9 aa, Homo sapien
KNSQVWLGR

SEQ ID NO: 5441 - protein, 10 aa, Homo sapien
KNSQVWLGRH

SEQ ID NO: 5442 - protein, 11 aa, Homo sapien
KNWETNKFSGY

SEQ ID NO: 5443 - protein, 8 aa, Homo sapien
KSEEFQKR

SEQ ID NO: 5444 - protein, 10 aa, Homo sapien
KSEEFQKRLH

SEQ ID NO: 5445 - protein, 9 aa, Homo sapien
KSLYESWTK

SEQ ID NO: 5446 - protein, 10 aa, Homo sapien
KSLYESWTKK

SEQ ID NO: 5447 - protein, 8 aa, Homo sapien
KSNPIVLR

SEQ ID NO: 5448 - protein, 10 aa, Homo sapien
KSPDEGFEGK

SEQ ID NO: 5449 - protein, 8 aa, Homo sapien
KSVILLGR

SEQ ID NO: 5450 - protein, 9 aa, Homo sapien
KSVILLGRH

SEQ ID NO: 5451 - protein, 9 aa, Homo sapien
KVFRGNKVK

SEQ ID NO: 5452 - protein, 11 aa, Homo sapien
KVKNAQLAGAK

SEQ ID NO: 5453 - protein, 11 aa, Homo sapien
KVTKFMLCAGR

SEQ ID NO: 5454 - protein, 10 aa, Homo sapien
KVVHYRKWIK

SEQ ID NO: 5455 - protein, 10 aa, Homo sapien
KVVHYRKWIK

SEQ ID NO: 5456 - protein, 10 aa, Homo sapien
LAGAKGVILY

SEQ ID NO: 5457 - protein, 10 aa, Homo sapien
LAHYDVLLSY

SEQ ID NO: 5458 - protein, 10 aa, Homo sapien
LAKQIQSQWK

SEQ ID NO: 5459 - protein, 10 aa, Homo sapien
LCAGLWTGGK

SEQ ID NO: 5460 - protein, 10 aa, Homo sapien
LCAGRWTGGK

SEQ ID NO: 5461 - protein, 10 aa, Homo sapien
LDELKAENIK

SEQ ID NO: 5462 - protein, 11 aa, Homo sapien
LDELKAENIKK

SEQ ID NO: 5463 - protein, 8 aa, Homo sapien
LDRSVLAK

SEQ ID NO: 5464 - protein, 11 aa, Homo sapien
LDRSVLAKELK

SEQ ID NO: 5465 - protein, 8 aa, Homo sapien
LDSVELAH

SEQ ID NO: 5466 - protein, 9 aa, Homo sapien
LDSVELAHY

SEQ ID NO: 5467 - protein, 11 aa, Homo sapien
LDVYNGLLPPY

SEQ ID NO: 5468 - protein, 10 aa, Homo sapien
LFEPEDTGQR

SEQ ID NO: 5469 - protein, 9 aa, Homo sapien
LFEPPPPGY

SEQ ID NO: 5470 - protein, 9 aa, Homo sapien
LFGIWSKVY

SEQ ID NO: 5471 - protein, 10 aa, Homo sapien
LFLLFFWLDR

SEQ ID NO: 5472 - protein, 8 aa, Homo sapien
LGEYIRKR

SEQ ID NO: 5473 - protein, 9 aa, Homo sapien
LGEYIRKRY

SEQ ID NO: 5474 - protein, 10 aa, Homo sapien
LGEYIRKRYR

SEQ ID NO: 5475 - protein, 11 aa, Homo sapien
LGEYIRKRYRK

SEQ ID NO: 5476 - protein, 10 aa, Homo sapien
LGFLFGWFIK

SEQ ID NO: 5477 - protein, 9 aa, Homo sapien
LGIASGRAR

SEQ ID NO: 5478 - protein, 10 aa, Homo sapien
LGIASGRARY

SEQ ID NO: 5479 - protein, 8 aa, Homo sapien
LGKLSGLH

SEQ ID NO: 5480 - protein, 9 aa, Homo sapien
LGLPDRPFY

SEQ ID NO: 5481 - protein, 10 aa, Homo sapien
LGLPDRPFYR

SEQ ID NO: 5482 - protein, 11 aa, Homo sapien
LGLPDRPFYRH

SEQ ID NO: 5483 - protein, 8 aa, Homo sapien
LGRHSLFH

SEQ ID NO: 5484 - protein, 8 aa, Homo sapien
LLFFWLDR

SEQ ID NO: 5485 - protein, 11 aa, Homo sapien
LLGFLFGWFIK

SEQ ID NO: 5486 - protein, 9 aa, Homo sapien
LLGRHSLFH

SEQ ID NO: 5487 - protein, 8 aa, Homo sapien
LLKHQSLR

SEQ ID NO: 5488 - protein, 8 aa, Homo sapien
LLKNRFLR

SEQ ID NO: 5489 - protein, 9 aa, Homo sapien
LLPPYASCH

SEQ ID NO: 5490 - protein, 9 aa, Homo sapien
LLQERGVAY

SEQ ID NO: 5491 - protein, 9 aa, Homo sapien
LLRLSEPAK

SEQ ID NO: 5492 - protein, 8 aa, Homo sapien
LLSLYGIH

SEQ ID NO: 5493 - protein, 9 aa, Homo sapien
LLSLYGIHK

SEQ ID NO: 5494 - protein, 11 aa, Homo sapien
LLSLYGIHKQK

SEQ ID NO: 5495 - protein, 9 aa, Homo sapien
LLSNDMCAR

SEQ ID NO: 5496 - protein, 11 aa, Homo sapien
LLSNDMCARAY

SEQ ID NO: 5497 - protein, 9 aa, Homo sapien
LLSYPNKTH

SEQ ID NO: 5498 - protein, 9 aa, Homo sapien
LLWQPIPVH

SEQ ID NO: 5499 - protein, 11 aa, Homo sapien
LLYLPFRNCPR

SEQ ID NO: 5500 - protein, 11 aa, Homo sapien
LMLLRLSEPAK

SEQ ID NO: 5501 - protein, 11 aa, Homo sapien
LMYSLVHNLTK

SEQ ID NO: 5502 - protein, 11 aa, Homo sapien
LNESYKHEQVY

SEQ ID NO: 5503 - protein, 8 aa, Homo sapien
LSEDQLLY

SEQ ID NO: 5504 - protein, 10 aa, Homo sapien
LSELSLLSLY

SEQ ID NO: 5505 - protein, 10 aa, Homo sapien
LSLLSLYGIH

SEQ ID NO: 5506 - protein, 11 aa, Homo sapien
LSLLSLYGIHK

SEQ ID NO: 5507 - protein, 8 aa, Homo sapien
LSLYGIHK

SEQ ID NO: 5508 - protein, 10 aa, Homo sapien
LSLYGIHKQK

SEQ ID NO: 5509 - protein, 8 aa, Homo sapien
LSNDMCAR

SEQ ID NO: 5510 - protein, 10 aa, Homo sapien
LSNDMCARAY

SEQ ID NO: 5511 - protein, 8 aa, Homo sapien
LSYPNKTH

SEQ ID NO: 5512 - protein, 11 aa, Homo sapien
LSYPNKTHPNY

SEQ ID NO: 5513 - protein, 8 aa, Homo sapien
LTAAHCIR

SEQ ID NO: 5514 - protein, 10 aa, Homo sapien
LTAAHCIRNK

SEQ ID NO: 5515 - protein, 8 aa, Homo sapien
LTAAHCLK

SEQ ID NO: 5516 - protein, 9 aa, Homo sapien
LTAAHCLKK

SEQ ID NO: 5517 - protein, 8 aa, Homo sapien
LTELYFEK

SEQ ID NO: 5518 - protein, 11 aa, Homo sapien
LTELYFEKGEY

SEQ ID NO: 5519 - protein, 10 aa, Homo sapien
LTPGYPANEY

SEQ ID NO: 5520 - protein, 9 aa, Homo sapien
LTQLGMEQH

SEQ ID NO: 5521 - protein, 10 aa, Homo sapien
LTQLGMEQHY

SEQ ID NO: 5522 - protein, 11 aa, Homo sapien
LVEKFYDPMFK

SEQ ID NO: 5523 - protein, 8 aa, Homo sapien
LVFRHGDR

SEQ ID NO: 5524 - protein, 10 aa, Homo sapien
LVHNLTKELK

SEQ ID NO: 5525 - protein, 8 aa, Homo sapien
LVNEILNH

SEQ ID NO: 5526 - protein, 10 aa, Homo sapien
LVNEILNHMK

SEQ ID NO: 5527 - protein, 11 aa, Homo sapien
LVNEILNHMKR

SEQ ID NO: 5528 - protein, 8 aa, Homo sapien
LVYVNYAR

SEQ ID NO: 5529 - protein, 9 aa, Homo sapien
MCARAYSEK

SEQ ID NO: 5530 - protein, 11 aa, Homo sapien
MLCAGLWTGGK

SEQ ID NO: 5531 - protein, 11 aa, Homo sapien
MLCAGRWTGGK

SEQ ID NO: 5532 - protein, 10 aa, Homo sapien
MLLRLSEPAK

SEQ ID NO: 5533 - protein, 11 aa, Homo sapien
MMNDQLMFLER

SEQ ID NO: 5534 - protein, 10 aa, Homo sapien
MNDQLMFLER

SEQ ID NO: 5535 - protein, 10 aa, Homo sapien
MSLLKHQSLR

SEQ ID NO: 5536 - protein, 10 aa, Homo sapien
MSLLKNRFLR

SEQ ID NO: 5537 - protein, 10 aa, Homo sapien
NADSSIEGNY

SEQ ID NO: 5538 - protein, 8 aa, Homo sapien
NAQLAGAK

SEQ ID NO: 5539 - protein, 10 aa, Homo sapien
NCSGKIVIAR

SEQ ID NO: 5540 - protein, 11 aa, Homo sapien
NCSGKIVIARY

SEQ ID NO: 5541 - protein, 9 aa, Homo sapien
NDFEVFFQR

SEQ ID NO: 5542 - protein, 8 aa, Homo sapien
NDMCARAY

SEQ ID NO: 5543 - protein, 11 aa, Homo sapien
NDMCARAYSEK

SEQ ID NO: 5544 - protein, 9 aa, Homo sapien
NDQLMFLER

SEQ ID NO: 5545 - protein, 8 aa, Homo sapien
NDVCAQVH

SEQ ID NO: 5546 - protein, 11 aa, Homo sapien
NDVCAQVHPQK

SEQ ID NO: 5547 - protein, 8 aa, Homo sapien
NFSTQKVK

SEQ ID NO: 5548 - protein, 10 aa, Homo sapien
NFSTQKVKMH

SEQ ID NO: 5549 - protein, 8 aa, Homo sapien
NFTEIASK

SEQ ID NO: 5550 - protein, 11 aa, Homo sapien
NGAGDPLTPGY

SEQ ID NO: 5551 - protein, 11 aa, Homo sapien
NGLLPPYASCH

SEQ ID NO: 5552 - protein, 9 aa, Homo sapien
NITPKHNMK

SEQ ID NO: 5553 - protein, 11 aa, Homo sapien
NLFEPEDTGQR

SEQ ID NO: 5554 - protein, 9 aa, Homo sapien
NLPGGGVQR

SEQ ID NO: 5555 - protein, 10 aa, Homo sapien
NMKAFLDELK

SEQ ID NO: 5556 - protein, 11 aa, Homo sapien
NMSLLKHQSLR

SEQ ID NO: 5557 - protein, 10 aa, Homo sapien
NSIVLPFDCR

SEQ ID NO: 5558 - protein, 8 aa, Homo sapien
NSQVWLGR

SEQ ID NO: 5559 - protein, 9 aa, Homo sapien
NSQVWLGRH

SEQ ID NO: 5560 - protein, 8 aa, Homo sapien
NSRLLQER

SEQ ID NO: 5561 - protein, 10 aa, Homo sapien
PADYFAPGVK

SEQ ID NO: 5562 - protein, 9 aa, Homo sapien
PAELTDAVK

SEQ ID NO: 5563 - protein, 9 aa, Homo sapien
PAKITDVVK

SEQ ID NO: 5564 - protein, 8 aa, Homo sapien
PALGTTCY

SEQ ID NO: 5565 - protein, 8 aa, Homo sapien
PALGTTCY

SEQ ID NO: 5566 - protein, 8 aa, Homo sapien
PANEYAYR

SEQ ID NO: 5567 - protein, 9 aa, Homo sapien
PANEYAYRR

SEQ ID NO: 5568 - protein, 9 aa, Homo sapien
PAVYTKVVH

SEQ ID NO: 5569 - protein, 10 aa, Homo sapien
PAVYTKVVHY

SEQ ID NO: 5570 - protein, 11 aa, Homo sapien
PAVYTKVVHYR

SEQ ID NO: 5571 - protein, 11 aa, Homo sapien
PCALPEKPAVY

SEQ ID NO: 5572 - protein, 11 aa, Homo sapien
PCALPERPSLY

SEQ ID NO: 5573 - protein, 8 aa, Homo sapien
PDEGFEGK

SEQ ID NO: 5574 - protein, 11 aa, Homo sapien
PDEGFEGKSLY

SEQ ID NO: 5575 - protein, 8 aa, Homo sapien
PDRPFYRH

SEQ ID NO: 5576 - protein, 11 aa, Homo sapien
PDRPFYRHVIY

SEQ ID NO: 5577 - protein, 10 aa, Homo sapien
PDRYVILGGH

SEQ ID NO: 5578 - protein, 11 aa, Homo sapien
PDRYVILGGHR

SEQ ID NO: 5579 - protein, 10 aa, Homo sapien
PDSSWRGSLK

SEQ ID NO: 5580 - protein, 8 aa, Homo sapien
PFYRHVIY

SEQ ID NO: 5581 - protein, 11 aa, Homo sapien
PGCSPSCPLER

SEQ ID NO: 5582 - protein, 11 aa, Homo sapien
PGFTGNFSTQK

SEQ ID NO: 5583 - protein, 8 aa, Homo sapien
PGYPANEY

SEQ ID NO: 5584 - protein, 10 aa, Homo sapien
PGYPANEYAY

SEQ ID NO: 5585 - protein, 11 aa, Homo sapien
PGYPANEYAYR

SEQ ID NO: 5586 - protein, 11 aa, Homo sapien
PIDTFPTDPIK

SEQ ID NO: 5587 - protein, 9 aa, Homo sapien
PIGYYDAQK

SEQ ID NO: 5588 - protein, 11 aa, Homo sapien
PILLWQPIPVH

SEQ ID NO: 5589 - protein, 10 aa, Homo sapien
PLGLPDRPFY

SEQ ID NO: 5590 - protein, 11 aa, Homo sapien
PLGLPDRPFYR

SEQ ID NO: 5591 - protein, 8 aa, Homo sapien
PLMYSLVH

SEQ ID NO: 5592 - protein, 9 aa, Homo sapien
PLSEDQLLY

SEQ ID NO: 5593 - protein, 11 aa, Homo sapien
PLTPGYPANEY

SEQ ID NO: 5594 - protein, 8 aa, Homo sapien
PLYCESVH

SEQ ID NO: 5595 - protein, 9 aa, Homo sapien
PLYDMSLLK

SEQ ID NO: 5596 - protein, 11 aa, Homo sapien
PLYDMSLLKNR

SEQ ID NO: 5597 - protein, 10 aa, Homo sapien
PLYHSVYETY

SEQ ID NO: 5598 - protein, 9 aa, Homo sapien
PLYNMSLLK

SEQ ID NO: 5599 - protein, 10 aa, Homo sapien
PLYNMSLLKH

SEQ ID NO: 5600 - protein, 8 aa, Homo sapien
PNKTHPNY

SEQ ID NO: 5601 - protein, 10 aa, Homo sapien
PSIPVHPIGY

SEQ ID NO: 5602 - protein, 11 aa, Homo sapien
PSIPVHPIGYY

SEQ ID NO: 5603 - protein, 9 aa, Homo sapien
PSKAWGEVK

SEQ ID NO: 5604 - protein, 10 aa, Homo sapien
PSKAWGEVKR

SEQ ID NO: 5605 - protein, 9 aa, Homo sapien
PSLYTKVVH

SEQ ID NO: 5606 - protein, 10 aa, Homo sapien
PSLYTKVVHY

SEQ ID NO: 5607 - protein, 11 aa, Homo sapien
PSLYTKVVHYR

SEQ ID NO: 5608 - protein, 10 aa, Homo sapien
PSPEFSGMPR

SEQ ID NO: 5609 - protein, 11 aa, Homo sapien
PSWATEDTMTK

SEQ ID NO: 5610 - protein, 9 aa, Homo sapien
PSYKKLIMY

SEQ ID NO: 5611 - protein, 8 aa, Homo sapien
PVHPIGYY

SEQ ID NO: 5612 - protein, 8 aa, Homo sapien
PVSHSFPH

SEQ ID NO: 5613 - protein, 11 aa, Homo sapien
PVSHSFPHPLY

SEQ ID NO: 5614 - protein, 9 aa, Homo sapien
QDLFGIWSK

SEQ ID NO: 5615 - protein, 11 aa, Homo sapien
QDLFGIWSKVY

SEQ ID NO: 5616 - protein, 10 aa, Homo sapien
QGMPEGDLVY

SEQ ID NO: 5617 - protein, 11 aa, Homo sapien
QIPSYKKLIMY

SEQ ID NO: 5618 - protein, 11 aa, Homo sapien
QLAGAKGVILY

SEQ ID NO: 5619 - protein, 11 aa, Homo sapien
QLAKQIQSQWK

SEQ ID NO: 5620 - protein, 8 aa, Homo sapien
QLGMEQHY

SEQ ID NO: 5621 - protein, 8 aa, Homo sapien
QLLYLPFR

SEQ ID NO: 5622 - protein, 10 aa, Homo sapien
QLTQLGMEQH

SEQ ID NO: 5623 - protein, 11 aa, Homo sapien
QLTQLGMEQHY

SEQ ID NO: 5624 - protein, 8 aa, Homo sapien
QSGAAVVH

SEQ ID NO: 5625 - protein, 11 aa, Homo sapien
QSLRPDEDSSH

SEQ ID NO: 5626 - protein, 11 aa, Homo sapien
QVAVYSHGWAH

SEQ ID NO: 5627 - protein, 11 aa, Homo sapien
QVFQVSHSFPH

SEQ ID NO: 5628 - protein, 9 aa, Homo sapien
QVHPQKVTK

SEQ ID NO: 5629 - protein, 9 aa, Homo sapien
QVLVASRGR

SEQ ID NO: 5630 - protein, 8 aa, Homo sapien
QVSHSFPH

SEQ ID NO: 5631 - protein, 11 aa, Homo sapien
QVSHSFPHPLY

SEQ ID NO: 5632 - protein, 11 aa, Homo sapien
QVYIRSTDVDR

SEQ ID NO: 5633 - protein, 9 aa, Homo sapien
RAAPLLLAR

SEQ ID NO: 5634 - protein, 8 aa, Homo sapien
RATQIPSY

SEQ ID NO: 5635 - protein, 9 aa, Homo sapien
RATQIPSYK

SEQ ID NO: 5636 - protein, 10 aa, Homo sapien
RATQIPSYKK

SEQ ID NO: 5637 - protein, 10 aa, Homo sapien
RAVCGGVLVH

SEQ ID NO: 5638 - protein, 10 aa, Homo sapien
RDMKINCSGK

SEQ ID NO: 5639 - protein, 8 aa, Homo sapien
RDYAVVLR

SEQ ID NO: 5640 - protein, 9 aa, Homo sapien
RDYAVVLRK

SEQ ID NO: 5641 - protein, 10 aa, Homo sapien
RDYAVVLRKY

SEQ ID NO: 5642 - protein, 11 aa, Homo sapien
RFLRPGDDSSH

SEQ ID NO: 5643 - protein, 11 aa, Homo sapien
RFQELESETLK

SEQ ID NO: 5644 - protein, 8 aa, Homo sapien
RGAVEPDR

SEQ ID NO: 5645 - protein, 9 aa, Homo sapien
RGAVEPDRY

SEQ ID NO: 5646 - protein, 8 aa, Homo sapien
RGSLKVPY

SEQ ID NO: 5647 - protein, 10 aa, Homo sapien
RIVGGWECEK

SEQ ID NO: 5648 - protein, 10 aa, Homo sapien
RIVGGWECEK

SEQ ID NO: 5649 - protein, 11 aa, Homo sapien
RIVGGWECEKH

SEQ ID NO: 5650 - protein, 11 aa, Homo sapien
RIVGGWECEKH

SEQ ID NO: 5651 - protein, 10 aa, Homo sapien
RIYNVIGTLR

SEQ ID NO: 5652 - protein, 8 aa, Homo sapien
RLGIASGR

SEQ ID NO: 5653 - protein, 10 aa, Homo sapien
RLGIASGRAR

SEQ ID NO: 5654 - protein, 11 aa, Homo sapien
RLGIASGRARY

SEQ ID NO: 5655 - protein, 10 aa, Homo sapien
RLLQERGVAY

SEQ ID NO: 5656 - protein, 9 aa, Homo sapien
RNETQHEPY

SEQ ID NO: 5657 - protein, 10 aa, Homo sapien
RNKSVILLGR

SEQ ID NO: 5658 - protein, 11 aa, Homo sapien
RNKSVILLGRH

SEQ ID NO: 5659 - protein, 8 aa, Homo sapien
RSFGTLKK

SEQ ID NO: 5660 - protein, 9 aa, Homo sapien
RSLQCVSLH

SEQ ID NO: 5661 - protein, 9 aa, Homo sapien
RSVLAKELK

SEQ ID NO: 5662 - protein, 10 aa, Homo sapien
RTEDFFKLER

SEQ ID NO: 5663 - protein, 9 aa, Homo sapien
RVDCTPLMY

SEQ ID NO: 5664 - protein, 10 aa, Homo sapien
RVPVSHSFPH

SEQ ID NO: 5665 - protein, 9 aa, Homo sapien
SAPPDSSWR

SEQ ID NO: 5666 - protein, 8 aa, Homo sapien
SAVATARR

SEQ ID NO: 5667 - protein, 10 aa, Homo sapien
SAVATARRPR

SEQ ID NO: 5668 - protein, 8 aa, Homo sapien
SCHLTELY

SEQ ID NO: 5669 - protein, 11 aa, Homo sapien
SCHLTELYFEK

SEQ ID NO: 5670 - protein, 10 aa, Homo sapien
SFDSLFSAVK

SEQ ID NO: 5671 - protein, 11 aa, Homo sapien
SFGTLKKEGWR

SEQ ID NO: 5672 - protein, 11 aa, Homo sapien
SGAAVVHEIVR

SEQ ID NO: 5673 - protein, 8 aa, Homo sapien
SGKIVIAR

SEQ ID NO: 5674 - protein, 9 aa, Homo sapien
SGKIVIARY

SEQ ID NO: 5675 - protein, 11 aa, Homo sapien
SGKIVIARYGK

SEQ ID NO: 5676 - protein, 10 aa, Homo sapien
SGLQMALDVY

SEQ ID NO: 5677 - protein, 8 aa, Homo sapien
SGMPRISK

SEQ ID NO: 5678 - protein, 11 aa, Homo sapien
SGNDFEVFFQR

SEQ ID NO: 5679 - protein, 8 aa, Homo sapien
SGRARYTK

SEQ ID NO: 5680 - protein, 10 aa, Homo sapien
SGYPLYHSVY

SEQ ID NO: 5681 - protein, 9 aa, Homo sapien
SIEGNYTLR

SEQ ID NO: 5682 - protein, 9 aa, Homo sapien
SIEPEEFLR

SEQ ID NO: 5683 - protein, 11 aa, Homo sapien
SIEPEEFLRPR

SEQ ID NO: 5684 - protein, 11 aa, Homo sapien
SIEPEEFLTPK

SEQ ID NO: 5685 - protein, 9 aa, Homo sapien
SIPVHPIGY

SEQ ID NO: 5686 - protein, 10 aa, Homo sapien
SIPVHPIGYY

SEQ ID NO: 5687 - protein, 11 aa, Homo sapien
SISMKHPQEMK

SEQ ID NO: 5688 - protein, 9 aa, Homo sapien
SIVLPFDCR

SEQ ID NO: 5689 - protein, 11 aa, Homo sapien
SIVLPFDCRDY

SEQ ID NO: 5690 - protein, 10 aa, Homo sapien
SLFEPPPPGY

SEQ ID NO: 5691 - protein, 9 aa, Homo sapien
SLLKHQSLR

SEQ ID NO: 5692 - protein, 9 aa, Homo sapien
SLLKNRFLR

SEQ ID NO: 5693 - protein, 9 aa, Homo sapien
SLLSLYGIH

SEQ ID NO: 5694 - protein, 10 aa, Homo sapien
SLLSLYGIHK

SEQ ID NO: 5695 - protein, 8 aa, Homo sapien
SLQCVSLH

SEQ ID NO: 5696 - protein, 10 aa, Homo sapien
SLRPDEDSSH

SEQ ID NO: 5697 - protein, 8 aa, Homo sapien
SLVHNLTK

SEQ ID NO: 5698 - protein, 11 aa, Homo sapien
SLVHNLTKELK

SEQ ID NO: 5699 - protein, 8 aa, Homo sapien
SLYESWTK

SEQ ID NO: 5700 - protein, 9 aa, Homo sapien
SLYESWTKK

SEQ ID NO: 5701 - protein, 9 aa, Homo sapien
SLYGIHKQK

SEQ ID NO: 5702 - protein, 11 aa, Homo sapien
SLYGIHKQKEK

SEQ ID NO: 5703 - protein, 8 aa, Homo sapien
SLYTKVVH

SEQ ID NO: 5704 - protein, 9 aa, Homo sapien
SLYTKVVHY

SEQ ID NO: 5705 - protein, 10 aa, Homo sapien
SLYTKVVHYR

SEQ ID NO: 5706 - protein, 11 aa, Homo sapien
SLYTKVVHYRK

SEQ ID NO: 5707 - protein, 9 aa, Homo sapien
SMKHPQEMK

SEQ ID NO: 5708 - protein, 11 aa, Homo sapien
SMKHPQEMKTY

SEQ ID NO: 5709 - protein, 9 aa, Homo sapien
SNDMCARAY

SEQ ID NO: 5710 - protein, 9 aa, Homo sapien
SNDVCAQVH

SEQ ID NO: 5711 - protein, 10 aa, Homo sapien
SNEATNITPK

SEQ ID NO: 5712 - protein, 11 aa, Homo sapien
SNEATNITPKH

SEQ ID NO: 5713 - protein, 9 aa, Homo sapien
SSHDLMLLR

SEQ ID NO: 5714 - protein, 9 aa, Homo sapien
SSHDLMLLR

SEQ ID NO: 5715 - protein, 10 aa, Homo sapien
SSIEGNYTLR

SEQ ID NO: 5716 - protein, 11 aa, Homo sapien
SSNEATNITPK

SEQ ID NO: 5717 - protein, 8 aa, Homo sapien
SSWRGSLK

SEQ ID NO: 5718 - protein, 11 aa, Homo sapien
SSWRGSLKVPY

SEQ ID NO: 5719 - protein, 10 aa, Homo sapien
STECMTTNSH

SEQ ID NO: 5720 - protein, 10 aa, Homo sapien
STEWAEENSR

SEQ ID NO: 5721 - protein, 9 aa, Homo sapien
STNEVTRIY

SEQ ID NO: 5722 - protein, 8 aa, Homo sapien
STQKVKMH

SEQ ID NO: 5723 - protein, 10 aa, Homo sapien
STQKVKMHIH

SEQ ID NO: 5724 - protein, 8 aa, Homo sapien
SVILLGRH

SEQ ID NO: 5725 - protein, 8 aa, Homo sapien
SVLAKELK

SEQ ID NO: 5726 - protein, 11 aa, Homo sapien
SVYETYELVEK

SEQ ID NO: 5727 - protein, 9 aa, Homo sapien
TAAHCIRNK

SEQ ID NO: 5728 - protein, 8 aa, Homo sapien
TAAHCLKK

SEQ ID NO: 5729 - protein, 9 aa, Homo sapien
TDSAVATAR

SEQ ID NO: 5730 - protein, 10 aa, Homo sapien
TDSAVATARR

SEQ ID NO: 5731 - protein, 8 aa, Homo sapien
TFPTDPIK

SEQ ID NO: 5732 - protein, 10 aa, Homo sapien
TGAVPLIQSR

SEQ ID NO: 5733 - protein, 8 aa, Homo sapien
TGNFSTQK

SEQ ID NO: 5734 - protein, 10 aa, Homo sapien
TGNFSTQKVK

SEQ ID NO: 5735 - protein, 9 aa, Homo sapien
TGQRVPVSH

SEQ ID NO: 5736 - protein, 9 aa, Homo sapien
TGQVFQVSH

SEQ ID NO: 5737 - protein, 9 aa, Homo sapien
TLGKLSGLH

SEQ ID NO: 5738 - protein, 8 aa, Homo sapien
TLKKEGWR

SEQ ID NO: 5739 - protein, 10 aa, Homo sapien
TLKKEGWRPR

SEQ ID NO: 5740 - protein, 11 aa, Homo sapien
TLKKEGWRPRR

SEQ ID NO: 5741 - protein, 9 aa, Homo sapien
TLKSEEFQK

SEQ ID NO: 5742 - protein, 10 aa, Homo sapien
TLKSEEFQKR

SEQ ID NO: 5743 - protein, 10 aa, Homo sapien
TLRGAVEPDR

SEQ ID NO: 5744 - protein, 11 aa, Homo sapien
TLRGAVEPDRY

SEQ ID NO: 5745 - protein, 11 aa, Homo sapien
TLRVDCTPLMY

SEQ ID NO: 5746 - protein, 9 aa, Homo sapien
TLVFRHGDR

SEQ ID NO: 5747 - protein, 8 aa, Homo sapien
TNEVTRIY

SEQ ID NO: 5748 - protein, 10 aa, Homo sapien
TNITPKHNMK

SEQ ID NO: 5749 - protein, 10 aa, Homo sapien
TNKFSGYPLY

SEQ ID NO: 5750 - protein, 11 aa, Homo sapien
TNKFSGYPLYH

SEQ ID NO: 5751 - protein, 11 aa, Homo sapien
TSLFEPPPPGY

SEQ ID NO: 5752 - protein, 11 aa, Homo sapien
TVPLSEDQLLY

SEQ ID NO: 5753 - protein, 8 aa, Homo sapien
VATARRPR

SEQ ID NO: 5754 - protein, 10 aa, Homo sapien
VAVYSHGWAH

SEQ ID NO: 5755 - protein, 9 aa, Homo sapien
VCAQVHPQK

SEQ ID NO: 5756 - protein, 8 aa, Homo sapien
VCGGVLVH

SEQ ID NO: 5757 - protein, 8 aa, Homo sapien
VDCTPLMY

SEQ ID NO: 5758 - protein, 11 aa, Homo sapien
VDPSKAWGEVK

SEQ ID NO: 5759 - protein, 10 aa, Homo sapien
VFQVSHSFPH

SEQ ID NO: 5760 - protein, 8 aa, Homo sapien
VFRGNKVK

SEQ ID NO: 5761 - protein, 8 aa, Homo sapien
VGGWECEK

SEQ ID NO: 5762 - protein, 8 aa, Homo sapien
VGGWECEK

SEQ ID NO: 5763 - protein, 9 aa, Homo sapien
VGGWECEKH

SEQ ID NO: 5764 - protein, 9 aa, Homo sapien
VGGWECEKH

SEQ ID NO: 5765 - protein, 9 aa, Homo sapien
VGLPSIPVH

SEQ ID NO: 5766 - protein, 10 aa, Homo sapien
VIARYGKVFR

SEQ ID NO: 5767 - protein, 11 aa, Homo sapien
VILLGRHSLFH

SEQ ID NO: 5768 - protein, 10 aa, Homo sapien
VILYSDPADY

SEQ ID NO: 5769 - protein, 11 aa, Homo sapien
VISNDVCAQVH

SEQ ID NO: 5770 - protein, 8 aa, Homo sapien
VIYAPSSH

SEQ ID NO: 5771 - protein, 10 aa, Homo sapien
VIYAPSSHNK

SEQ ID NO: 5772 - protein, 11 aa, Homo sapien
VIYAPSSHNKY

SEQ ID NO: 5773 - protein, 8 aa, Homo sapien
VLLSYPNK

SEQ ID NO: 5774 - protein, 10 aa, Homo sapien
VLLSYPNKTH

SEQ ID NO: 5775 - protein, 9 aa, Homo sapien
VLPFDCRDY

SEQ ID NO: 5776 - protein, 8 aa, Homo sapien
VLRKYADK

SEQ ID NO: 5777 - protein, 10 aa, Homo sapien
VLRKYADKIY

SEQ ID NO: 5778 - protein, 9 aa, Homo sapien
VLTAAHCIR

SEQ ID NO: 5779 - protein, 11 aa, Homo sapien
VLTAAHCIRNK

SEQ ID NO: 5780 - protein, 9 aa, Homo sapien
VLTAAHCLK

SEQ ID NO: 5781 - protein, 10 aa, Homo sapien
VLTAAHCLKK

SEQ ID NO: 5782 - protein, 8 aa, Homo sapien
VLVASRGR

SEQ ID NO: 5783 - protein, 9 aa, Homo sapien
VLVNEILNH

SEQ ID NO: 5784 - protein, 11 aa, Homo sapien
VLVNEILNHMK

SEQ ID NO: 5785 - protein, 9 aa, Homo sapien
VNEILNHMK

SEQ ID NO: 5786 - protein, 10 aa, Homo sapien
VNEILNHMKR

SEQ ID NO: 5787 - protein, 11 aa, Homo sapien
VNYARTEDFFK

SEQ ID NO: 5788 - protein, 11 aa, Homo sapien
VSFDSLFSAVK

SEQ ID NO: 5789 - protein, 11 aa, Homo sapien
VSGLQMALDVY

SEQ ID NO: 5790 - protein, 10 aa, Homo sapien
VSHSFPHPLY

SEQ ID NO: 5791 - protein, 10 aa, Homo sapien
VSHSFPHPLY

SEQ ID NO: 5792 - protein, 10 aa, Homo sapien
VTKFMLCAGR

SEQ ID NO: 5793 - protein, 10 aa, Homo sapien
VTLVFRHGDR

SEQ ID NO: 5794 - protein, 9 aa, Homo sapien
VVHYRKWIK

SEQ ID NO: 5795 - protein, 9 aa, Homo sapien
VVHYRKWIK

SEQ ID NO: 5796 - protein, 9 aa, Homo sapien
VVLRKYADK

SEQ ID NO: 5797 - protein, 11 aa, Homo sapien
VVLRKYADKIY

SEQ ID NO: 5798 - protein, 10 aa, Homo sapien
WAHCGGVLVH

SEQ ID NO: 5799 - protein, 9 aa, Homo sapien
WATEDTMTK

SEQ ID NO: 5800 - protein, 11 aa, Homo sapien
WATEDTMTKLR

SEQ ID NO: 5801 - protein, 9 aa, Homo sapien
WGEVKRQIY

SEQ ID NO: 5802 - protein, 11 aa, Homo sapien
WGPEPCALPEK

SEQ ID NO: 5803 - protein, 11 aa, Homo sapien
WGSEPCALPER

SEQ ID NO: 5804 - protein, 11 aa, Homo sapien
WGSIEPEEFLR

SEQ ID NO: 5805 - protein, 11 aa, Homo sapien
WIGAAPLILSR

SEQ ID NO: 5806 - protein, 9 aa, Homo sapien
WLDRSVLAK

SEQ ID NO: 5807 - protein, 10 aa, Homo sapien
WNLPGGGVQR

SEQ ID NO: 5808 - protein, 9 aa, Homo sapien
WSKVYDPLY

SEQ ID NO: 5809 - protein, 11 aa, Homo sapien
WSTECMTTNSH

SEQ ID NO: 5810 - protein, 10 aa, Homo sapien
WVLTAAHCIR

SEQ ID NO: 5811 - protein, 10 aa, Homo sapien
WVLTAAHCLK

SEQ ID NO: 5812 - protein, 11 aa, Homo sapien
WVLTAAHCLKK

SEQ ID NO: 5813 - protein, 11 aa, Homo sapien
YADKIYSISMK

SEQ ID NO: 5814 - protein, 10 aa, Homo sapien
YAGESFPGIY

SEQ ID NO: 5815 - protein, 8 aa, Homo sapien
YAPSSHNK

SEQ ID NO: 5816 - protein, 9 aa, Homo sapien
YAPSSHNKY

SEQ ID NO: 5817 - protein, 9 aa, Homo sapien
YARTEDFFK

SEQ ID NO: 5818 - protein, 10 aa, Homo sapien
YASCHLTELY

SEQ ID NO: 5819 - protein, 8 aa, Homo sapien
YAVVLRKY

SEQ ID NO: 5820 - protein, 11 aa, Homo sapien
YAVVLRKYADK

SEQ ID NO: 5821 - protein, 10 aa, Homo sapien
YDALFDIESK

SEQ ID NO: 5822 - protein, 9 aa, Homo sapien
YDAQKLLEK

SEQ ID NO: 5823 - protein, 9 aa, Homo sapien
YDMSLLKNR

SEQ ID NO: 5824 - protein, 10 aa, Homo sapien
YDPLYCESVH

SEQ ID NO: 5825 - protein, 8 aa, Homo sapien
YDPMFKYH

SEQ ID NO: 5826 - protein, 10 aa, Homo sapien
YDVLLSYPNK

SEQ ID NO: 5827 - protein, 9 aa, Homo sapien
YFAPGVKSY

SEQ ID NO: 5828 - protein, 8 aa, Homo sapien
YFVEMYYR

SEQ ID NO: 5829 - protein, 9 aa, Homo sapien
YGIHKQKEK

SEQ ID NO: 5830 - protein, 11 aa, Homo sapien
YGIHKQKEKSR

SEQ ID NO: 5831 - protein, 9 aa, Homo sapien
YGKVFRGNK

SEQ ID NO: 5832 - protein, 11 aa, Homo sapien
YGKVFRGNKVK

SEQ ID NO: 5833 - protein, 8 aa, Homo sapien
YIRKRYRK

SEQ ID NO: 5834 - protein, 9 aa, Homo sapien
YIRSTDVDR

SEQ ID NO: 5835 - protein, 9 aa, Homo sapien
YLPFRNCPR

SEQ ID NO: 5836 - protein, 8 aa, Homo sapien
YNFTQIPH

SEQ ID NO: 5837 - protein, 8 aa, Homo sapien
YNGLLPPY

SEQ ID NO: 5838 - protein, 8 aa, Homo sapien
YNMSLLKH

SEQ ID NO: 5839 - protein, 8 aa, Homo sapien
YNVIGTLR

SEQ ID NO: 5840 - protein, 9 aa, Homo sapien
YSLVHNLTK

SEQ ID NO: 5841 - protein, 9 aa, Homo sapien
YTKNWETNK

SEQ ID NO: 5842 - protein, 8 aa, Homo sapien
YTKVVHYR

SEQ ID NO: 5843 - protein, 8 aa, Homo sapien
YTKVVHYR

SEQ ID NO: 5844 - protein, 9 aa, Homo sapien
YTKVVHYRK

SEQ ID NO: 5845 - protein, 9 aa, Homo sapien
YTKVVHYRK

SEQ ID NO: 5846 - protein, 8 aa, Homo sapien
YVILGGHR

SEQ ID NO: 5847 - protein, 8 aa, Homo sapien
AFIDPLGL

SEQ ID NO: 5848 - protein, 11 aa, Homo sapien
AFLDELKAENI

SEQ ID NO: 5849 - protein, 11 aa, Homo sapien
AFTVQAAAETL

SEQ ID NO: 5850 - protein, 8 aa, Homo sapien
AMTNLAAL

SEQ ID NO: 5851 - protein, 9 aa, Homo sapien
AMTNLAALF

SEQ ID NO: 5852 - protein, 9 aa, Homo sapien
AWGEVKRQI

SEQ ID NO: 5853 - protein, 9 aa, Homo sapien
AYINADSSI

SEQ ID NO: 5854 - protein, 9 aa, Homo sapien
AYSEKVTEF

SEQ ID NO: 5855 - protein, 11 aa, Homo sapien
AYSEKVTEFML

SEQ ID NO: 5856 - protein, 9 aa, Homo sapien
CYASGWGSI

SEQ ID NO: 5857 - protein, 9 aa, Homo sapien
CYASGWGSI

SEQ ID NO: 5858 - protein, 8 aa, Homo sapien
DFDKSNPI

SEQ ID NO: 5859 - protein, 10 aa, Homo sapien
DFDKSNPIVL

SEQ ID NO: 5860 - protein, 9 aa, Homo sapien
DFEVFFQRL

SEQ ID NO: 5861 - protein, 11 aa, Homo sapien
DFEVFFQRLGI

SEQ ID NO: 5862 - protein, 11 aa, Homo sapien
DFFKLERDMKI

SEQ ID NO: 5863 - protein, 9 aa, Homo sapien
DFIATLGKL

SEQ ID NO: 5864 - protein, 10 aa, Homo sapien
DMKINCSGKI

SEQ ID NO: 5865 - protein, 9 aa, Homo sapien
DMSLLKNRF

SEQ ID NO: 5866 - protein, 10 aa, Homo sapien
DMSLLKNRFL

SEQ ID NO: 5867 - protein, 9 aa, Homo sapien
EFGLDSVEL

SEQ ID NO: 5868 - protein, 10 aa, Homo sapien
EFGLLGSTEW

SEQ ID NO: 5869 - protein, 8 aa, Homo sapien
EFLRPRSL

SEQ ID NO: 5870 - protein, 8 aa, Homo sapien
EFLTPKKL

SEQ ID NO: 5871 - protein, 8 aa, Homo sapien
EFMLCAGL

SEQ ID NO: 5872 - protein, 9 aa, Homo sapien
EFMLCAGLW

SEQ ID NO: 5873 - protein, 8 aa, Homo sapien
EFSGMPRI

SEQ ID NO: 5874 - protein, 11 aa, Homo sapien
EFSGMPRISKL

SEQ ID NO: 5875 - protein, 9 aa, Homo sapien
EMKTYSVSF

SEQ ID NO: 5876 - protein, 9 aa, Homo sapien
EWAEENSRL

SEQ ID NO: 5877 - protein, 10 aa, Homo sapien
EWAEENSRLL

SEQ ID NO: 5878 - protein, 8 aa, Homo sapien
EYAYRRGI

SEQ ID NO: 5879 - protein, 10 aa, Homo sapien
EYIRKRYRKF

SEQ ID NO: 5880 - protein, 11 aa, Homo sapien
EYIRKRYRKFL

SEQ ID NO: 5881 - protein, 10 aa, Homo sapien
FFKLERDMKI

SEQ ID NO: 5882 - protein, 8 aa, Homo sapien
FFLLGFLF

SEQ ID NO: 5883 - protein, 10 aa, Homo sapien
FFLLGFLFGW

SEQ ID NO: 5884 - protein, 11 aa, Homo sapien
FFLLGFLFGWF

SEQ ID NO: 5885 - protein, 9 aa, Homo sapien
FFWLDRSVL

SEQ ID NO: 5886 - protein, 8 aa, Homo sapien
FMLCAGLW

SEQ ID NO: 5887 - protein, 8 aa, Homo sapien
FMLCAGRW

SEQ ID NO: 5888 - protein, 8 aa, Homo sapien
FWLDRSVL

SEQ ID NO: 5889 - protein, 10 aa, Homo sapien
FYDPMFKYHL

SEQ ID NO: 5890 - protein, 11 aa, Homo sapien
GFEGKSLYESW

SEQ ID NO: 5891 - protein, 8 aa, Homo sapien
GFFLLGFL

SEQ ID NO: 5892 - protein, 9 aa, Homo sapien
GFFLLGFLF

SEQ ID NO: 5893 - protein, 11 aa, Homo sapien
GFFLLGFLFGW

SEQ ID NO: 5894 - protein, 8 aa, Homo sapien
GFGQLTQL

SEQ ID NO: 5895 - protein, 8 aa, Homo sapien
GFLFGWFI

SEQ ID NO: 5896 - protein, 8 aa, Homo sapien
GFLFLLFF

SEQ ID NO: 5897 - protein, 9 aa, Homo sapien
GFLFLLFFW

SEQ ID NO: 5898 - protein, 10 aa, Homo sapien
GFLFLLFFWL

SEQ ID NO: 5899 - protein, 8 aa, Homo sapien
GMEQHYEL

SEQ ID NO: 5900 - protein, 8 aa, Homo sapien
GMPRISKL

SEQ ID NO: 5901 - protein, 10 aa, Homo sapien
GMVFELANSI

SEQ ID NO: 5902 - protein, 9 aa, Homo sapien
GWAHCGGVL

SEQ ID NO: 5903 - protein, 11 aa, Homo sapien
GWECEKHSQPW

SEQ ID NO: 5904 - protein, 11 aa, Homo sapien
GWECEKHSQPW

SEQ ID NO: 5905 - protein, 10 aa, Homo sapien
GWGSIEPEEF

SEQ ID NO: 5906 - protein, 10 aa, Homo sapien
GWGSIEPEEF

SEQ ID NO: 5907 - protein, 11 aa, Homo sapien
GWGSIEPEEFL

SEQ ID NO: 5908 - protein, 11 aa, Homo sapien
GWGSIEPEEFL

SEQ ID NO: 5909 - protein, 8 aa, Homo sapien
GWRPRRTI

SEQ ID NO: 5910 - protein, 9 aa, Homo sapien
GWRPRRTIL

SEQ ID NO: 5911 - protein, 10 aa, Homo sapien
GWRPRRTILF

SEQ ID NO: 5912 - protein, 8 aa, Homo sapien
GYENVSDI

SEQ ID NO: 5913 - protein, 8 aa, Homo sapien
GYYDAQKL

SEQ ID NO: 5914 - protein, 9 aa, Homo sapien
GYYDAQKLL

SEQ ID NO: 5915 - protein, 8 aa, Homo sapien
HMKRATQI

SEQ ID NO: 5916 - protein, 8 aa, Homo sapien
HYELGEYI

SEQ ID NO: 5917 - protein, 10 aa, Homo sapien
HYRKWIKDTI

SEQ ID NO: 5918 - protein, 10 aa, Homo sapien
HYRKWIKDTI

SEQ ID NO: 5919 - protein, 8 aa, Homo sapien
IWNPILLW

SEQ ID NO: 5920 - protein, 11 aa, Homo sapien
IWNPILLWQPI

SEQ ID NO: 5921 - protein, 9 aa, Homo sapien
IWSKVYDPL

SEQ ID NO: 5922 - protein, 8 aa, Homo sapien
IYDALFDI

SEQ ID NO: 5923 - protein, 8 aa, Homo sapien
IYNVIGTL

SEQ ID NO: 5924 - protein, 9 aa, Homo sapien
KFLYNFTQI

SEQ ID NO: 5925 - protein, 9 aa, Homo sapien
KFMLCAGRW

SEQ ID NO: 5926 - protein, 9 aa, Homo sapien
KFSERLQDF

SEQ ID NO: 5927 - protein, 11 aa, Homo sapien
KFYDPMFKYHL

SEQ ID NO: 5928 - protein, 9 aa, Homo sapien
KYADKIYSI

SEQ ID NO: 5929 - protein, 10 aa, Homo sapien
KYAGESFPGI

SEQ ID NO: 5930 - protein, 10 aa, Homo sapien
LFASWDAEEF

SEQ ID NO: 5931 - protein, 10 aa, Homo sapien
LFFWLDRSVL

SEQ ID NO: 5932 - protein, 11 aa, Homo sapien
LFHPEDTGQVF

SEQ ID NO: 5933 - protein, 8 aa, Homo sapien
LFLLFFWL

SEQ ID NO: 5934 - protein, 9 aa, Homo sapien
LFPPEGVSI

SEQ ID NO: 5935 - protein, 10 aa, Homo sapien
LFPPEGVSIW

SEQ ID NO: 5936 - protein, 8 aa, Homo sapien
LFSAVKNF

SEQ ID NO: 5937 - protein, 11 aa, Homo sapien
LFSAVKNFTEI

SEQ ID NO: 5938 - protein, 8 aa, Homo sapien
LMFLERAF

SEQ ID NO: 5939 - protein, 9 aa, Homo sapien
LMFLERAFI

SEQ ID NO: 5940 - protein, 8 aa, Homo sapien
LMSAMTNL

SEQ ID NO: 5941 - protein, 11 aa, Homo sapien
LMSAMTNLAAL

SEQ ID NO: 5942 - protein, 9 aa, Homo sapien
LMYSLVHNL

SEQ ID NO: 5943 - protein, 9 aa, Homo sapien
LYCESVHNF

SEQ ID NO: 5944 - protein, 11 aa, Homo sapien
LYCESVHNFTL

SEQ ID NO: 5945 - protein, 11 aa, Homo sapien
LYDMSLLKNRF

SEQ ID NO: 5946 - protein, 9 aa, Homo sapien
LYFEKGEYF

SEQ ID NO: 5947 - protein, 11 aa, Homo sapien
LYHSVYETYEL

SEQ ID NO: 5948 - protein, 11 aa, Homo sapien
LYLPFRNCPRF

SEQ ID NO: 5949 - protein, 10 aa, Homo sapien
LYNFTQIPHL

SEQ ID NO: 5950 - protein, 9 aa, Homo sapien
LYSDPADYF

SEQ ID NO: 5951 - protein, 11 aa, Homo sapien
LYTKVVHYRKW

SEQ ID NO: 5952 - protein, 8 aa, Homo sapien
MFLERAFI

SEQ ID NO: 5953 - protein, 11 aa, Homo sapien
MFLERAFIDPL

SEQ ID NO: 5954 - protein, 8 aa, Homo sapien
MMNDQLMF

SEQ ID NO: 5955 - protein, 9 aa, Homo sapien
MMNDQLMFL

SEQ ID NO: 5956 - protein, 8 aa, Homo sapien
MWDLVLSI

SEQ ID NO: 5957 - protein, 10 aa, Homo sapien
MWDLVLSIAL

SEQ ID NO: 5958 - protein, 8 aa, Homo sapien
MYSLVHNL

SEQ ID NO: 5959 - protein, 8 aa, Homo sapien
NFQLAKQI

SEQ ID NO: 5960 - protein, 11 aa, Homo sapien
NFSTQKVKMHI

SEQ ID NO: 5961 - protein, 9 aa, Homo sapien
NFTEIASKF

SEQ ID NO: 5962 - protein, 8 aa, Homo sapien
NFTQIPHL

SEQ ID NO: 5963 - protein, 9 aa, Homo sapien
NMKAFLDEL

SEQ ID NO: 5964 - protein, 10 aa, Homo sapien
NMSLLKHQSL

SEQ ID NO: 5965 - protein, 8 aa, Homo sapien
NYARTEDF

SEQ ID NO: 5966 - protein, 9 aa, Homo sapien
NYARTEDFF

SEQ ID NO: 5967 - protein, 11 aa, Homo sapien
NYARTEDFFKL

SEQ ID NO: 5968 - protein, 11 aa, Homo sapien
NYTLRVDCTPL

SEQ ID NO: 5969 - protein, 11 aa, Homo sapien
PFDCRDYAVVL

SEQ ID NO: 5970 - protein, 8 aa, Homo sapien
PFRNCPRF

SEQ ID NO: 5971 - protein, 11 aa, Homo sapien
PFRNCPRFQEL

SEQ ID NO: 5972 - protein, 11 aa, Homo sapien
PWQVAVYSHGW

SEQ ID NO: 5973 - protein, 10 aa, Homo sapien
PYASCHLTEL

SEQ ID NO: 5974 - protein, 9 aa, Homo sapien
PYKDFIATL

SEQ ID NO: 5975 - protein, 8 aa, Homo sapien
PYNVGPGF

SEQ ID NO: 5976 - protein, 10 aa, Homo sapien
QMALDVYNGL

SEQ ID NO: 5977 - protein, 11 aa, Homo sapien
QMALDVYNGLL

SEQ ID NO: 5978 - protein, 10 aa, Homo sapien
QWVLTAAHCI

SEQ ID NO: 5979 - protein, 10 aa, Homo sapien
QWVLTAAHCL

SEQ ID NO: 5980 - protein, 10 aa, Homo sapien
RFAELVGPVI

SEQ ID NO: 5981 - protein, 10 aa, Homo sapien
RFQELESETL

SEQ ID NO: 5982 - protein, 9 aa, Homo sapien
RMMNDQLMF

SEQ ID NO: 5983 - protein, 10 aa, Homo sapien
RMMNDQLMFL

SEQ ID NO: 5984 - protein, 8 aa, Homo sapien
RWLCAGAL

SEQ ID NO: 5985 - protein, 10 aa, Homo sapien
RWLCAGALVL

SEQ ID NO: 5986 - protein, 11 aa, Homo sapien
RYTKNWETNKF

SEQ ID NO: 5987 - protein, 10 aa, Homo sapien
SFGTLKKEGW

SEQ ID NO: 5988 - protein, 9 aa, Homo sapien
SFPGIYDAL

SEQ ID NO: 5989 - protein, 10 aa, Homo sapien
SFPGIYDALF

SEQ ID NO: 5990 - protein, 11 aa, Homo sapien
SFPHPLYDMSL

SEQ ID NO: 5991 - protein, 11 aa, Homo sapien
SFPHPLYNMSL

SEQ ID NO: 5992 - protein, 11 aa, Homo sapien
SWATEDTMTKL

SEQ ID NO: 5993 - protein, 9 aa, Homo sapien
SWDAEEFGL

SEQ ID NO: 5994 - protein, 10 aa, Homo sapien
SWDAEEFGLL

SEQ ID NO: 5995 - protein, 9 aa, Homo sapien
SWGPEPCAL

SEQ ID NO: 5996 - protein, 9 aa, Homo sapien
SWGSEPCAL

SEQ ID NO: 5997 - protein, 9 aa, Homo sapien
SWPQGFGQL

SEQ ID NO: 5998 - protein, 11 aa, Homo sapien
SWTKKSPSPEF

SEQ ID NO: 5999 - protein, 9 aa, Homo sapien
SYKHEQVYI

SEQ ID NO: 6000 - protein, 8 aa, Homo sapien
SYPDGWNL

SEQ ID NO: 6001 - protein, 11 aa, Homo sapien
SYPNKTHPNYI

SEQ ID NO: 6002 - protein, 8 aa, Homo sapien
TMTKLREL

SEQ ID NO: 6003 - protein, 11 aa, Homo sapien
TMTKLRELSEL

SEQ ID NO: 6004 - protein, 8 aa, Homo sapien
TWIGAAPL

SEQ ID NO: 6005 - protein, 9 aa, Homo sapien
TWIGAAPLI

SEQ ID NO: 6006 - protein, 10 aa, Homo sapien
TWIGAAPLIL

SEQ ID NO: 6007 - protein, 8 aa, Homo sapien
TYELVEKF

SEQ ID NO: 6008 - protein, 9 aa, Homo sapien
TYSVSFDSL

SEQ ID NO: 6009 - protein, 10 aa, Homo sapien
TYSVSFDSLF

SEQ ID NO: 6010 - protein, 8 aa, Homo sapien
VFELANSI

SEQ ID NO: 6011 - protein, 10 aa, Homo sapien
VFELANSIVL

SEQ ID NO: 6012 - protein, 8 aa, Homo sapien
VFFQRLGI

SEQ ID NO: 6013 - protein, 9 aa, Homo sapien
VFLTLSVTW

SEQ ID NO: 6014 - protein, 10 aa, Homo sapien
VFLTLSVTWI

SEQ ID NO: 6015 - protein, 8 aa, Homo sapien
VFQVSHSF

SEQ ID NO: 6016 - protein, 10 aa, Homo sapien
VFRHGDRSPI

SEQ ID NO: 6017 - protein, 11 aa, Homo sapien
VMDLPTQEPAL

SEQ ID NO: 6018 - protein, 8 aa, Homo sapien
VWLGRHNL

SEQ ID NO: 6019 - protein, 9 aa, Homo sapien
VWLGRHNLF

SEQ ID NO: 6020 - protein, 11 aa, Homo sapien
VYETYELVEKF

SEQ ID NO: 6021 - protein, 11 aa, Homo sapien
VYTKVVHYRKW

SEQ ID NO: 6022 - protein, 11 aa, Homo sapien
VYVNYARTEDF

SEQ ID NO: 6023 - protein, 8 aa, Homo sapien
YFEKGEYF

SEQ ID NO: 6024 - protein, 8 aa, Homo sapien
YYDAQKLL

SEQ ID NO: 6025 - protein, 12 aa, Homo sapien
MRAAPLLLARAA

SEQ ID NO: 6026 - protein, 12 aa, Homo sapien
MWDLVLSIALSV

SEQ ID NO: 6027 - protein, 12 aa, Homo sapien
VVFLTLSVTWIG

SEQ ID NO: 6028 - protein, 13 aa, Homo sapien
MWDLVLSIALSVG

SEQ ID NO: 6029 - protein, 13 aa, Homo sapien
VVFLTLSVTWIGA

SEQ ID NO: 6030 - protein, 14 aa, Homo sapien
VVFLTLSVTWIGAA

SEQ ID NO: 6031 - protein, 15 aa, Homo sapien
AALFPPEGVSIWNPI

SEQ ID NO: 6032 - protein, 15 aa, Homo sapien
AAPLILSRIVGGWEC

SEQ ID NO: 6033 - protein, 15 aa, Homo sapien
AAPLLLARAASLSLG

SEQ ID NO: 6034 - protein, 15 aa, Homo sapien
AASLSLGFLFLLFFW

SEQ ID NO: 6035 - protein, 15 aa, Homo sapien
ADKIYSISMKHPQEM

SEQ ID NO: 6036 - protein, 15 aa, Homo sapien
AEAVGLPSIPVHPIG

SEQ ID NO: 6037 - protein, 15 aa, Homo sapien
AEEFGLLGSTEWAEE

SEQ ID NO: 6038 - protein, 15 aa, Homo sapien
AELVGPVIPQDWSTE

SEQ ID NO: 6039 - protein, 15 aa, Homo sapien
AGRWTGGKSTCSGDS

SEQ ID NO: 6040 - protein, 15 aa, Homo sapien
AHCIRNKSVILLGRH

SEQ ID NO: 6041 - protein, 15 aa, Homo sapien
AKELKFVTLVFRHGD

SEQ ID NO: 6042 - protein, 15 aa, Homo sapien
ALDVYNGLLPPYASC

SEQ ID NO: 6043 - protein, 15 aa, Homo sapien
ALSVGCTGAVPLIQS

SEQ ID NO: 6044 - protein, 15 aa, Homo sapien
APLILSRIVGGWECE

SEQ ID NO: 6045 - protein, 15 aa, Homo sapien
APLLLARAASLSLGF

SEQ ID NO: 6046 - protein, 15 aa, Homo sapien
ARAYSEKVTEFMLCA

SEQ ID NO: 6047 - protein, 15 aa, Homo sapien
ASGWGSIEPEEFLRP

SEQ ID NO: 6048 - protein, 15 aa, Homo sapien
ASGWGSIEPEEFLTP

SEQ ID NO: 6049 - protein, 15 aa, Homo sapien
AVGLPSIPVHPIGYY

SEQ ID NO: 6050 - protein, 15 aa, Homo sapien
AVKVMDLPTQEPALG

SEQ ID NO: 6051 - protein, 15 aa, Homo sapien
AVPLIQSRIVGGWEC

SEQ ID NO: 6052 - protein, 15 aa, Homo sapien
CAQVHPQKVTKFMLC

SEQ ID NO: 6053 - protein, 15 aa, Homo sapien
CESVHNFTLPSWATE

SEQ ID NO: 6054 - protein, 15 aa, Homo sapien
CNGVLQGITSWGPEP

SEQ ID NO: 6055 - protein, 15 aa, Homo sapien
CNGVLQGITSWGSEP

SEQ ID NO: 6056 - protein, 15 aa, Homo sapien
CPRFQELESETLKSE

SEQ ID NO: 6057 - protein, 15 aa, Homo sapien
CTPLMYSLVHNLTKE

SEQ ID NO: 6058 - protein, 15 aa, Homo sapien
DEGFEGKSLYESWTK

SEQ ID NO: 6059 - protein, 15 aa, Homo sapien
DFEVFFQRLGIASGR

SEQ ID NO: 6060 - protein, 15 aa, Homo sapien
DLHVISNDVCAQVHP

SEQ ID NO: 6061 - protein, 15 aa, Homo sapien
DLVLSIALSVGCTGA

SEQ ID NO: 6062 - protein, 15 aa, Homo sapien
DPMFKYHLTVAQVRG

SEQ ID NO: 6063 - protein, 15 aa, Homo sapien
DQLMFLERAFIDPLG

SEQ ID NO: 6064 - protein, 15 aa, Homo sapien
DRPFYRHVIYAPSSH

SEQ ID NO: 6065 - protein, 15 aa, Homo sapien
DRSVLAKELKFVTLV

SEQ ID NO: 6066 - protein, 15 aa, Homo sapien
DRTLMSAMTNLAALF

SEQ ID NO: 6067 - protein, 15 aa, Homo sapien
DSSIEGNYTLRVDCT

SEQ ID NO: 6068 - protein, 15 aa, Homo sapien
DTTVSGLQMALDVYN

SEQ ID NO: 6069 - protein, 15 aa, Homo sapien
EEFLRPRSLQCVSLH

SEQ ID NO: 6070 - protein, 15 aa, Homo sapien
EEFLTPKKLQCVDLH

SEQ ID NO: 6071 - protein, 15 aa, Homo sapien
EFGLDSVELAHYDVL

SEQ ID NO: 6072 - protein, 15 aa, Homo sapien
ERDMKINCSGKIVIA

SEQ ID NO: 6073 - protein, 15 aa, Homo sapien
ERGVAYINADSSIEG

SEQ ID NO: 6074 - protein, 15 aa, Homo sapien
ESKVDPSKAWGEVKR

SEQ ID NO: 6075 - protein, 15 aa, Homo sapien
EVFFQRLGIASGRAR

SEQ ID NO: 6076 - protein, 15 aa, Homo sapien
EYAYRRGIAEAVGLP

SEQ ID NO: 6077 - protein, 15 aa, Homo sapien
FAELVGPVIPQDWST

SEQ ID NO: 6078 - protein, 15 aa, Homo sapien
FFWLDRSVLAKELKF

SEQ ID NO: 6079 - protein, 15 aa, Homo sapien
FGQLTQLGMEQHYEL

SEQ ID NO: 6080 - protein, 15 aa, Homo sapien
FLFLLFFWLDRSVLA

SEQ ID NO: 6081 - protein, 15 aa, Homo sapien
FLTLSVTWIGAAPLI

SEQ ID NO: 6082 - protein, 15 aa, Homo sapien
FQELESETLKSEEFQ

SEQ ID NO: 6083 - protein, 15 aa, Homo sapien
FSAFSPQGMPEGDLV

SEQ ID NO: 6084 - protein, 15 aa, Homo sapien
FSGYPLYHSVYETYE

SEQ ID NO: 6085 - protein, 15 aa, Homo sapien
FTEIASKFSERLQDF

SEQ ID NO: 6086 - protein, 15 aa, Homo sapien
GAAVVHEIVRSFGTL

SEQ ID NO: 6087 - protein, 15 aa, Homo sapien
GDLVYVNYARTEDFF

SEQ ID NO: 6088 - protein, 15 aa, Homo sapien
GDPLTPGYPANEYAY

SEQ ID NO: 6089 - protein, 15 aa, Homo sapien
GGFFLLGFLFGWFIK

SEQ ID NO: 6090 - protein, 15 aa, Homo sapien
GGGVQRGNILNLNGA

SEQ ID NO: 6091 - protein, 15 aa, Homo sapien
GGPLVCNGVLQGITS

SEQ ID NO: 6092 - protein, 15 aa, Homo sapien
GGPLVCNGVLQGITS

SEQ ID NO: 6093 - protein, 15 aa, Homo sapien
GGVLVNEILNHMKRA

SEQ ID NO: 6094 - protein, 15 aa, Homo sapien
GKSLYESWTKKSPSP

SEQ ID NO: 6095 - protein, 15 aa, Homo sapien
GKVFRGNKVKNAQLA

SEQ ID NO: 6096 - protein, 15 aa, Homo sapien
GMVFELANSIVLPFD

SEQ ID NO: 6097 - protein, 15 aa, Homo sapien
GNEIFNTSLFEPPPP

SEQ ID NO: 6098 - protein, 15 aa, Homo sapien
GNILNLNGAGDPLTP

SEQ ID NO: 6099 - protein, 15 aa, Homo sapien
GNKVKNAQLAGAKGV

SEQ ID NO: 6100 - protein, 15 aa, Homo sapien
GPGFTGNFSTQKVKM

SEQ ID NO: 6101 - protein, 15 aa, Homo sapien
GPLVCNGVLQGITSW

SEQ ID NO: 6102 - protein, 15 aa, Homo sapien
GPLVCNGVLQGITSW

SEQ ID NO: 6103 - protein, 15 aa, Homo sapien
GPVIPQDWSTECMTT

SEQ ID NO: 6104 - protein, 15 aa, Homo sapien
GQDLFGIWSKVYDPL

SEQ ID NO: 6105 - protein, 15 aa, Homo sapien
GQRVPVSHSFPHPLY

SEQ ID NO: 6106 - protein, 15 aa, Homo sapien
GQVFQVSHSFPHPLY

SEQ ID NO: 6107 - protein, 15 aa, Homo sapien
GRAVCGGVLVHPQWV

SEQ ID NO: 6108 - protein, 15 aa, Homo sapien
GVAYINADSSIEGNY

SEQ ID NO: 6109 - protein, 15 aa, Homo sapien
GVILYSDPADYFAPG

SEQ ID NO: 6110 - protein, 15 aa, Homo sapien
GVLVHPQWVLTAAHC

SEQ ID NO: 6111 - protein, 15 aa, Homo sapien
GVLVHPQWVLTAAHC

SEQ ID NO: 6112 - protein, 15 aa, Homo sapien
GVSIWNPILLWQPIP

SEQ ID NO: 6113 - protein, 15 aa, Homo sapien
GWNLPGGGVQRGNIL

SEQ ID NO: 6114 - protein, 15 aa, Homo sapien
HDLMLLRLSEPAELT

SEQ ID NO: 6115 - protein, 15 aa, Homo sapien
HDLMLLRLSEPAKIT

SEQ ID NO: 6116 - protein, 15 aa, Homo sapien
HEIVRSFGTLKKEGW

SEQ ID NO: 6117 - protein, 15 aa, Homo sapien
HEPYPLMLPGCSPSC

SEQ ID NO: 6118 - protein, 15 aa, Homo sapien
HEQVYIRSTDVDRTL

SEQ ID NO: 6119 - protein, 15 aa, Homo sapien
HNLFEPEDTGQRVPV

SEQ ID NO: 6120 - protein, 15 aa, Homo sapien
HPLYDMSLLKNRFLR

SEQ ID NO: 6121 - protein, 15 aa, Homo sapien
HPLYNMSLLKHQSLR

SEQ ID NO: 6122 - protein, 15 aa, Homo sapien
HPQWVLTAAHCIRNK

SEQ ID NO: 6123 - protein, 15 aa, Homo sapien
HPQWVLTAAHCLKKN

SEQ ID NO: 6124 - protein, 15 aa, Homo sapien
HSLFHPEDTGQVFQV

SEQ ID NO: 6125 - protein, 15 aa, Homo sapien
HSVYETYELVEKFYD

SEQ ID NO: 6126 - protein, 15 aa, Homo sapien
HYDVLLSYPNKTHPN

SEQ ID NO: 6127 - protein, 15 aa, Homo sapien
IDTFPTDPIKESSWP

SEQ ID NO: 6128 - protein, 15 aa, Homo sapien
IGYYDAQKLLEKMGG

SEQ ID NO: 6129 - protein, 15 aa, Homo sapien
IKKFLYNFTQIPHLA

SEQ ID NO: 6130 - protein, 15 aa, Homo sapien
ILLWQPIPVHTVPLS

SEQ ID NO: 6131 - protein, 15 aa, Homo sapien
IPSYKKLIMYSAHDT

SEQ ID NO: 6132 - protein, 15 aa, Homo sapien
ITSWGPEPCALPEKP

SEQ ID NO: 6133 - protein, 15 aa, Homo sapien
ITSWGSEPCALPERP

SEQ ID NO: 6134 - protein, 15 aa, Homo sapien
IYSISMKHPQEMKTY

SEQ ID NO: 6135 - protein, 15 aa, Homo sapien
KAFLDELKAENIKKF

SEQ ID NO: 6136 - protein, 15 aa, Homo sapien
KEGWRPRRTILFASW

SEQ ID NO: 6137 - protein, 15 aa, Homo sapien
KFLYNFTQIPHLAGT

SEQ ID NO: 6138 - protein, 15 aa, Homo sapien
KGVILYSDPADYFAP

SEQ ID NO: 6139 - protein, 15 aa, Homo sapien
KPAVYTKVVHYRKWI

SEQ ID NO: 6140 - protein, 15 aa, Homo sapien
KSRLQGGVLVNEILN

SEQ ID NO: 6141 - protein, 15 aa, Homo sapien
KVKMHIHSTNEVTRI

SEQ ID NO: 6142 - protein, 15 aa, Homo sapien
KYHLTVAQVRGGMVF

SEQ ID NO: 6143 - protein, 15 aa, Homo sapien
LAHYDVLLSYPNKTH

SEQ ID NO: 6144 - protein, 15 aa, Homo sapien
LDELKAENIKKFLYN

SEQ ID NO: 6145 - protein, 15 aa, Homo sapien
LDVYNGLLPPYASCH

SEQ ID NO: 6146 - protein, 15 aa, Homo sapien
LEKMGGSAPPDSSWR

SEQ ID NO: 6147 - protein, 15 aa, Homo sapien
LFFWLDRSVLAKELK

SEQ ID NO: 6148 - protein, 15 aa, Homo sapien
LFGWFIKSSNEATNI

SEQ ID NO: 6149 - protein, 15 aa, Homo sapien
LGFLFGWFIKSSNEA

SEQ ID NO: 6150 - protein, 15 aa, Homo sapien
LHLLSNDMCARAYSE

SEQ ID NO: 6151 - protein, 15 aa, Homo sapien
LHPYKDFIATLGKLS

SEQ ID NO: 6152 - protein, 15 aa, Homo sapien
LHVISNDVCAQVHPQ

SEQ ID NO: 6153 - protein, 15 aa, Homo sapien
LIMYSAHDTTVSGLQ

SEQ ID NO: 6154 - protein, 15 aa, Homo sapien
LLFFWLDRSVLAKEL

SEQ ID NO: 6155 - protein, 15 aa, Homo sapien
LLYLPFRNCPRFQEL

SEQ ID NO: 6156 - protein, 15 aa, Homo sapien
LMFLERAFIDPLGLP

SEQ ID NO: 6157 - protein, 15 aa, Homo sapien
LMLLRLSEPAELTDA

SEQ ID NO: 6158 - protein, 15 aa, Homo sapien
LMLLRLSEPAKITDV

SEQ ID NO: 6159 - protein, 15 aa, Homo sapien
LPPYASCHLTELYFE

SEQ ID NO: 6160 - protein, 15 aa, Homo sapien
LPSIPVHPIGYYDAQ

SEQ ID NO: 6161 - protein, 15 aa, Homo sapien
LPSWATEDTMTKLRE

SEQ ID NO: 6162 - protein, 15 aa, Homo sapien
LQCVDLHVISNDVCA

SEQ ID NO: 6163 - protein, 15 aa, Homo sapien
LQCVSLHLLSNDMCA

SEQ ID NO: 6164 - protein, 15 aa, Homo sapien
LQDFDKSNPIVLRMM

SEQ ID NO: 6165 - protein, 15 aa, Homo sapien
LQGITSWGPEPCALP

SEQ ID NO: 6166 - protein, 15 aa, Homo sapien
LQGITSWGSEPCALP

SEQ ID NO: 6167 - protein, 15 aa, Homo sapien
LRELSELSLLSLYGI

SEQ ID NO: 6168 - protein, 15 aa, Homo sapien
LRMMNDQLMFLERAF

SEQ ID NO: 6169 - protein, 15 aa, Homo sapien
LSELSLLSLYGIHKQ

SEQ ID NO: 6170 - protein, 15 aa, Homo sapien
LSGLHGQDLFGIWSK

SEQ ID NO: 6171 - protein, 15 aa, Homo sapien
LSLLSLYGIHKQKEK

SEQ ID NO: 6172 - protein, 15 aa, Homo sapien
LVYVNYARTEDFFKL

SEQ ID NO: 6173 - protein, 15 aa, Homo sapien
MFKYHLTVAQVRGGM

SEQ ID NO: 6174 - protein, 15 aa, Homo sapien
MPRISKLGSGNDFEV

SEQ ID NO: 6175 - protein, 15 aa, Homo sapien
MSAMTNLAALFPPEG

SEQ ID NO: 6176 - protein, 15 aa, Homo sapien
MSLLKHQSLRPDEDS

SEQ ID NO: 6177 - protein, 15 aa, Homo sapien
MSLLKNRFLRPGDDS

SEQ ID NO: 6178 - protein, 15 aa, Homo sapien
MTNLAALFPPEGVSI

SEQ ID NO: 6179 - protein, 15 aa, Homo sapien
MWDLVLSIALSVGCT

SEQ ID NO: 6180 - protein, 15 aa, Homo sapien
MYSLVHNLTKELKSP

SEQ ID NO: 6181 - protein, 15 aa, Homo sapien
NESYKHEQVYIRSTD

SEQ ID NO: 6182 - protein, 15 aa, Homo sapien
NFTLPSWATEDTMTK

SEQ ID NO: 6183 - protein, 15 aa, Homo sapien
NGLLPPYASCHLTEL

SEQ ID NO: 6184 - protein, 15 aa, Homo sapien
NGVLQGITSWGPEPC

SEQ ID NO: 6185 - protein, 15 aa, Homo sapien
NGVLQGITSWGSEPC

SEQ ID NO: 6186 - protein, 15 aa, Homo sapien
NMSLLKHQSLRPDED

SEQ ID NO: 6187 - protein, 15 aa, Homo sapien
NPILLWQPIPVHTVP

SEQ ID NO: 6188 - protein, 15 aa, Homo sapien
NSIVLPFDCRDYAVV

SEQ ID NO: 6189 - protein, 15 aa, Homo sapien
NTSLFEPPPPGYENV

SEQ ID NO: 6190 - protein, 15 aa, Homo sapien
NYTLRVDCTPLMYSL

SEQ ID NO: 6191 - protein, 15 aa, Homo sapien
PADYFAPGVKSYPDG

SEQ ID NO: 6192 - protein, 15 aa, Homo sapien
PCALPEKPAVYTKVV

SEQ ID NO: 6193 - protein, 15 aa, Homo sapien
PCALPERPSLYTKVV

SEQ ID NO: 6194 - protein, 15 aa, Homo sapien
PEEFLRPRSLQCVSL

SEQ ID NO: 6195 - protein, 15 aa, Homo sapien
PEGVSIWNPILLWQP

SEQ ID NO: 6196 - protein, 15 aa, Homo sapien
PHPLYDMSLLKNRFL

SEQ ID NO: 6197 - protein, 15 aa, Homo sapien
PHPLYNMSLLKHQSL

SEQ ID NO: 6198 - protein, 15 aa, Homo sapien
PILLWQPIPVHTVPL

SEQ ID NO: 6199 - protein, 15 aa, Homo sapien
PIPVHTVPLSEDQLL

SEQ ID NO: 6200 - protein, 15 aa, Homo sapien
PKKLQCVDLHVISND

SEQ ID NO: 6201 - protein, 15 aa, Homo sapien
PLLLARAASLSLGFL

SEQ ID NO: 6202 - protein, 15 aa, Homo sapien
PLMLPGCSPSCPLER

SEQ ID NO: 6203 - protein, 15 aa, Homo sapien
PQDWSTECMTTNSHQ

SEQ ID NO: 6204 - protein, 15 aa, Homo sapien
PQEMKTYSVSFDSLF

SEQ ID NO: 6205 - protein, 15 aa, Homo sapien
PQGMPEGDLVYVNYA

SEQ ID NO: 6206 - protein, 15 aa, Homo sapien
PQKVTKFMLCAGRWT

SEQ ID NO: 6207 - protein, 15 aa, Homo sapien
PRSLQCVSLHLLSND

SEQ ID NO: 6208 - protein, 15 aa, Homo sapien
PRWLCAGALVLAGGF

SEQ ID NO: 6209 - protein, 15 aa, Homo sapien
PYNVGPGFTGNFSTQ

SEQ ID NO: 6210 - protein, 15 aa, Homo sapien
PYPLMLPGCSPSCPL

SEQ ID NO: 6211 - protein, 15 aa, Homo sapien
QGGVLVNEILNHMKR

SEQ ID NO: 6212 - protein, 15 aa, Homo sapien
QIYVAAFTVQAAAET

SEQ ID NO: 6213 - protein, 15 aa, Homo sapien
QSQWKEFGLDSVELA

SEQ ID NO: 6214 - protein, 15 aa, Homo sapien
QVWLGRHNLFEPEDT

SEQ ID NO: 6215 - protein, 15 aa, Homo sapien
QVYIRSTDVDRTLMS

SEQ ID NO: 6216 - protein, 15 aa, Homo sapien
QWVLTAAHCIRNKSV

SEQ ID NO: 6217 - protein, 15 aa, Homo sapien
QWVLTAAHCLKKNSQ

SEQ ID NO: 6218 - protein, 15 aa, Homo sapien
RAFIDPLGLPDRPFY

SEQ ID NO: 6219 - protein, 15 aa, Homo sapien
RDSWVFGGIDPQSGA

SEQ ID NO: 6220 - protein, 15 aa, Homo sapien
RGGMVFELANSIVLP

SEQ ID NO: 6221 - protein, 15 aa, Homo sapien
RHVIYAPSSHNKYAG

SEQ ID NO: 6222 - protein, 12 aa, Homo sapien
RKWIKDTIAANP

SEQ ID NO: 6223 - protein, 12 aa, Homo sapien
RKWIKDTIVANP

SEQ ID NO: 6224 - protein, 15 aa, Homo sapien
RLGIASGRARYTKNW

SEQ ID NO: 6225 - protein, 15 aa, Homo sapien
RPRWLCAGALVLAGG

SEQ ID NO: 6226 - protein, 15 aa, Homo sapien
RPSLYTKVVHYRKWI

SEQ ID NO: 6227 - protein, 15 aa, Homo sapien
RQIYVAAFTVQAAAE

SEQ ID NO: 6228 - protein, 15 aa, Homo sapien
RSPIDTFPTDPIKES

SEQ ID NO: 6229 - protein, 15 aa, Homo sapien
RVPVSHSFPHPLYNM

SEQ ID NO: 6230 - protein, 15 aa, Homo sapien
SDIVPPFSAFSPQGM

SEQ ID NO: 6231 - protein, 15 aa, Homo sapien
SEKVTEFMLCAGLWT

SEQ ID NO: 6232 - protein, 15 aa, Homo sapien
SHDLMLLRLSEPAEL

SEQ ID NO: 6233 - protein, 15 aa, Homo sapien
SHDLMLLRLSEPAKI

SEQ ID NO: 6234 - protein, 15 aa, Homo sapien
SIALSVGCTGAVPLI

SEQ ID NO: 6235 - protein, 15 aa, Homo sapien
SKVYDPLYCESVHNF

SEQ ID NO: 6236 - protein, 15 aa, Homo sapien
SLHLLSNDMCARAYS

SEQ ID NO: 6237 - protein, 15 aa, Homo sapien
SLSLGFLFLLFFWLD

SEQ ID NO: 6238 - protein, 15 aa, Homo sapien
SNPIVLRMMNDQLMF

SEQ ID NO: 6239 - protein, 15 aa, Homo sapien
SQPWQVLVASRGRAV

SEQ ID NO: 6240 - protein, 15 aa, Homo sapien
SRIVGGWECEKHSQP

SEQ ID NO: 6241 - protein, 15 aa, Homo sapien
SRIVGGWECEKHSQP

SEQ ID NO: 6242 - protein, 15 aa, Homo sapien
SRLLQERGVAYINAD

SEQ ID NO: 6243 - protein, 15 aa, Homo sapien
STDVDRTLMSAMTNL

SEQ ID NO: 6244 - protein, 15 aa, Homo sapien
STEWAEENSRLLQER

SEQ ID NO: 6245 - protein, 15 aa, Homo sapien
SVELAHYDVLLSYPN

SEQ ID NO: 6246 - protein, 15 aa, Homo sapien
SVILLGRHSLFHPED

SEQ ID NO: 6247 - protein, 15 aa, Homo sapien
SVSFDSLFSAVKNFT

SEQ ID NO: 6248 - protein, 15 aa, Homo sapien
SVTWIGAAPLILSRI

SEQ ID NO: 6249 - protein, 15 aa, Homo sapien
SWVFGGIDPQSGAAV

SEQ ID NO: 6250 - protein, 15 aa, Homo sapien
TDAVKVMDLPTQEPA

SEQ ID NO: 6251 - protein, 15 aa, Homo sapien
TDVVKVLGLPTQEPA

SEQ ID NO: 6252 - protein, 15 aa, Homo sapien
TEFMLCAGLWTGGKD

SEQ ID NO: 6253 - protein, 15 aa, Homo sapien
TGAVPLIQSRIVGGW

SEQ ID NO: 6254 - protein, 15 aa, Homo sapien
TGNFSTQKVKMHIHS

SEQ ID NO: 6255 - protein, 15 aa, Homo sapien
TILFASWDAEEFGLL

SEQ ID NO: 6256 - protein, 15 aa, Homo sapien
TLRVDCTPLMYSLVH

SEQ ID NO: 6257 - protein, 15 aa, Homo sapien
TLSVTWIGAAPLILS

SEQ ID NO: 6258 - protein, 15 aa, Homo sapien
TNKFSGYPLYHSVYE

SEQ ID NO: 6259 - protein, 15 aa, Homo sapien
TRIYNVIGTLRGAVE

SEQ ID NO: 6260 - protein, 15 aa, Homo sapien
TSLFEPPPPGYENVS

SEQ ID NO: 6261 - protein, 15 aa, Homo sapien
TVPLSEDQLLYLPFR

SEQ ID NO: 6262 - protein, 15 aa, Homo sapien
TYSVSFDSLFSAVKN

SEQ ID NO: 6263 - protein, 15 aa, Homo sapien
VAAFTVQAAAETLSE

SEQ ID NO: 6264 - protein, 15 aa, Homo sapien
VAQVRGGMVFELANS

SEQ ID NO: 6265 - protein, 15 aa, Homo sapien
VAVYSHGWAHCGGVL

SEQ ID NO: 6266 - protein, 15 aa, Homo sapien
VAYINADSSIEGNYT

SEQ ID NO: 6267 - protein, 15 aa, Homo sapien
VEMYYRNETQHEPYP

SEQ ID NO: 6268 - protein, 15 aa, Homo sapien
VFELANSIVLPFDCR

SEQ ID NO: 6269 - protein, 15 aa, Homo sapien
VFQVSHSFPHPLYDM

SEQ ID NO: 6270 - protein, 15 aa, Homo sapien
VHPIGYYDAQKLLEK

SEQ ID NO: 6271 - protein, 15 aa, Homo sapien
VILLGRHSLFHPEDT

SEQ ID NO: 6272 - protein, 15 aa, Homo sapien
VKNFTEIASKFSERL

SEQ ID NO: 6273 - protein, 15 aa, Homo sapien
VLGLPTQEPALGTTC

SEQ ID NO: 6274 - protein, 15 aa, Homo sapien
VLRMMNDQLMFLERA

SEQ ID NO: 6275 - protein, 15 aa, Homo sapien
VMDLPTQEPALGTTC

SEQ ID NO: 6276 - protein, 15 aa, Homo sapien
VPLIQSRIVGGWECE

SEQ ID NO: 6277 - protein, 15 aa, Homo sapien
VPPFSAFSPQGMPEG

SEQ ID NO: 6278 - protein, 15 aa, Homo sapien
VSDIVPPFSAFSPQG

SEQ ID NO: 6279 - protein, 15 aa, Homo sapien
VSIWNPILLWQPIPV

SEQ ID NO: 6280 - protein, 15 aa, Homo sapien
VTWIGAAPLILSRIV

SEQ ID NO: 6281 - protein, 15 aa, Homo sapien
VVFLTLSVTWIGAAP

SEQ ID NO: 6282 - protein, 15 aa, Homo sapien
VVKVLGLPTQEPALG

SEQ ID NO: 6283 - protein, 15 aa, Homo sapien
WDLVLSIALSVGCTG

SEQ ID NO: 6284 - protein, 15 aa, Homo sapien
WKEFGLDSVELAHYD

SEQ ID NO: 6285 - protein, 15 aa, Homo sapien
WNLLHETDSAVATAR

SEQ ID NO: 6286 - protein, 15 aa, Homo sapien
WNPILLWQPIPVHTV

SEQ ID NO: 6287 - protein, 15 aa, Homo sapien
WQPIPVHTVPLSEDQ

SEQ ID NO: 6288 - protein, 15 aa, Homo sapien
YAVVLRKYADKIYSI

SEQ ID NO: 6289 - protein, 15 aa, Homo sapien
YDALFDIESKVDPSK

SEQ ID NO: 6290 - protein, 15 aa, Homo sapien
YDPLYCESVHNFTLP

SEQ ID NO: 6291 - protein, 15 aa, Homo sapien
YDPMFKYHLTVAQVR

SEQ ID NO: 6292 - protein, 15 aa, Homo sapien
YENVSDIVPPFSAFS

SEQ ID NO: 6293 - protein, 15 aa, Homo sapien
YESWTKKSPSPEFSG

SEQ ID NO: 6294 - protein, 15 aa, Homo sapien
YKKLIMYSAHDTTVS

SEQ ID NO: 6295 - protein, 15 aa, Homo sapien
YNGLLPPYASCHLTE

SEQ ID NO: 6296 - protein, 15 aa, Homo sapien
YPLMLPGCSPSCPLE

SEQ ID NO: 6297 - protein, 15 aa, Homo sapien
YRHVIYAPSSHNKYA

SEQ ID NO: 6298 - protein, 13 aa, Homo sapien
YRKWIKDTIAANP

SEQ ID NO: 6299 - protein, 13 aa, Homo sapien
YRKWIKDTIVANP

SEQ ID NO: 6300 - protein, 9 aa, Homo sapien
MRAAPLLLA

SEQ ID NO: 6301 - protein, 9 aa, Homo sapien
MWDLVLSIA

SEQ ID NO: 6302 - protein, 9 aa, Homo sapien
VVFLTLSVT

SEQ ID NO: 6303 - protein, 9 aa, Homo sapien
WDLVLSIAL

SEQ ID NO: 6304 - protein, 9 aa, Homo sapien
VFLTLSVTW

SEQ ID NO: 6305 - protein, 9 aa, Homo sapien
FLTLSVTWI

SEQ ID NO: 6306 - protein, 9 aa, Homo sapien
FPPEGVSIW

SEQ ID NO: 6307 - protein, 9 aa, Homo sapien
LILSRIVGG

SEQ ID NO: 6308 - protein, 9 aa, Homo sapien
LLLARAASL

SEQ ID NO: 6309 - protein, 9 aa, Homo sapien
LSLGFLFLL

SEQ ID NO: 6310 - protein, 9 aa, Homo sapien
IYSISMKHP

SEQ ID NO: 6311 - protein, 9 aa, Homo sapien
VGLPSIPVH

SEQ ID NO: 6312 - protein, 9 aa, Homo sapien
FGLLGSTEW

SEQ ID NO: 6313 - protein, 9 aa, Homo sapien
VGPVIPQDW

SEQ ID NO: 6314 - protein, 9 aa, Homo sapien
WTGGKSTCS

SEQ ID NO: 6315 - protein, 9 aa, Homo sapien
IRNKSVILL

SEQ ID NO: 6316 - protein, 9 aa, Homo sapien
LKFVTLVFR

SEQ ID NO: 6317 - protein, 9 aa, Homo sapien
VYNGLLPPY

SEQ ID NO: 6318 - protein, 9 aa, Homo sapien
VGCTGAVPL

SEQ ID NO: 6319 - protein, 9 aa, Homo sapien
ILSRIVGGW

SEQ ID NO: 6320 - protein, 9 aa, Homo sapien
LLARAASLS

SEQ ID NO: 6321 - protein, 9 aa, Homo sapien
YSEKVTEFM

SEQ ID NO: 6322 - protein, 9 aa, Homo sapien
WGSIEPEEF

SEQ ID NO: 6323 - protein, 9 aa, Homo sapien
WGSIEPEEF

SEQ ID NO: 6324 - protein, 9 aa, Homo sapien
LPSIPVHPI

SEQ ID NO: 6325 - protein, 9 aa, Homo sapien
VMDLPTQEP

SEQ ID NO: 6326 - protein, 9 aa, Homo sapien
LIQSRIVGG

SEQ ID NO: 6327 - protein, 9 aa, Homo sapien
VHPQKVTKF

SEQ ID NO: 6328 - protein, 9 aa, Homo sapien
VHNFTLPSW

SEQ ID NO: 6329 - protein, 9 aa, Homo sapien
VLQGITSWG

SEQ ID NO: 6330 - protein, 9 aa, Homo sapien
VLQGITSWG

SEQ ID NO: 6331 - protein, 9 aa, Homo sapien
FQELESETL

SEQ ID NO: 6332 - protein, 9 aa, Homo sapien
LMYSLVHNL

SEQ ID NO: 6333 - protein, 9 aa, Homo sapien
FEGKSLYES

SEQ ID NO: 6334 - protein, 9 aa, Homo sapien
VFFQRLGIA

SEQ ID NO: 6335 - protein, 9 aa, Homo sapien
VISNDVCAQ

SEQ ID NO: 6336 - protein, 9 aa, Homo sapien
LSIALSVGC

SEQ ID NO: 6337 - protein, 9 aa, Homo sapien
FKYHLTVAQ

SEQ ID NO: 6338 - protein, 9 aa, Homo sapien
MFLERAFID

SEQ ID NO: 6339 - protein, 9 aa, Homo sapien
FYRHVIYAP

SEQ ID NO: 6340 - protein, 9 aa, Homo sapien
VLAKELKFV

SEQ ID NO: 6341 - protein, 9 aa, Homo sapien
LMSAMTNLA

SEQ ID NO: 6342 - protein, 9 aa, Homo sapien
IEGNYTLRV

SEQ ID NO: 6343 - protein, 9 aa, Homo sapien
VSGLQMALD

SEQ ID NO: 6344 - protein, 9 aa, Homo sapien
LRPRSLQCV

SEQ ID NO: 6345 - protein, 9 aa, Homo sapien
LTPKKLQCV

SEQ ID NO: 6346 - protein, 9 aa, Homo sapien
LDSVELAHY

SEQ ID NO: 6347 - protein, 9 aa, Homo sapien
MKINCSGKI

SEQ ID NO: 6348 - protein, 9 aa, Homo sapien
VAYINADSS

SEQ ID NO: 6349 - protein, 9 aa, Homo sapien
VDPSKAWGE

SEQ ID NO: 6350 - protein, 9 aa, Homo sapien
FQRLGIASG

SEQ ID NO: 6351 - protein, 9 aa, Homo sapien
YRRGIAEAV

SEQ ID NO: 6352 - protein, 9 aa, Homo sapien
LVGPVIPQD

SEQ ID NO: 6353 - protein, 9 aa, Homo sapien
LDRSVLAKE

SEQ ID NO: 6354 - protein, 9 aa, Homo sapien
LTQLGMEQH

SEQ ID NO: 6355 - protein, 9 aa, Homo sapien
LLFFWLDRS

SEQ ID NO: 6356 - protein, 9 aa, Homo sapien
LSVTWIGAA

SEQ ID NO: 6357 - protein, 9 aa, Homo sapien
LESETLKSE

SEQ ID NO: 6358 - protein, 9 aa, Homo sapien
FSPQGMPEG

SEQ ID NO: 6359 - protein, 9 aa, Homo sapien
YPLYHSVYE

SEQ ID NO: 6360 - protein, 9 aa, Homo sapien
IASKFSERL

SEQ ID NO: 6361 - protein, 9 aa, Homo sapien
VVHEIVRSF

SEQ ID NO: 6362 - protein, 9 aa, Homo sapien
VYVNYARTE

SEQ ID NO: 6363 - protein, 9 aa, Homo sapien
LTPGYPANE

SEQ ID NO: 6364 - protein, 9 aa, Homo sapien
FLLGFLFGW

SEQ ID NO: 6365 - protein, 9 aa, Homo sapien
VQRGNILNL

SEQ ID NO: 6366 - protein, 9 aa, Homo sapien
LVCNGVLQG

SEQ ID NO: 6367 - protein, 9 aa, Homo sapien
LVCNGVLQG

SEQ ID NO: 6368 - protein, 9 aa, Homo sapien
LVNEILNHM

SEQ ID NO: 6369 - protein, 9 aa, Homo sapien
LYESWTKKS

SEQ ID NO: 6370 - protein, 9 aa, Homo sapien
FRGNKVKNA

SEQ ID NO: 6371 - protein, 9 aa, Homo sapien
FELANSIVL

SEQ ID NO: 6372 - protein, 9 aa, Homo sapien
IFNTSLFEP

SEQ ID NO: 6373 - protein, 9 aa, Homo sapien
LNLNGAGDP

SEQ ID NO: 6374 - protein, 9 aa, Homo sapien
VKNAQLAGA

SEQ ID NO: 6375 - protein, 9 aa, Homo sapien
FTGNFSTQK

SEQ ID NO: 6376 - protein, 9 aa, Homo sapien
VCNGVLQGI

SEQ ID NO: 6377 - protein, 9 aa, Homo sapien
VCNGVLQGI

SEQ ID NO: 6378 - protein, 9 aa, Homo sapien
IPQDWSTEC

SEQ ID NO: 6379 - protein, 9 aa, Homo sapien
LFGIWSKVY

SEQ ID NO: 6380 - protein, 9 aa, Homo sapien
VPVSHSFPH

SEQ ID NO: 6381 - protein, 9 aa, Homo sapien
FQVSHSFPH

SEQ ID NO: 6382 - protein, 9 aa, Homo sapien
VCGGVLVHP

SEQ ID NO: 6383 - protein, 9 aa, Homo sapien
YINADSSIE

SEQ ID NO: 6384 - protein, 9 aa, Homo sapien
LYSDPADYF

SEQ ID NO: 6385 - protein, 9 aa, Homo sapien
VHPQWVLTA

SEQ ID NO: 6386 - protein, 9 aa, Homo sapien
VHPQWVLTA

SEQ ID NO: 6387 - protein, 9 aa, Homo sapien
IWNPILLWQ

SEQ ID NO: 6388 - protein, 9 aa, Homo sapien
LPGGGVQRG

SEQ ID NO: 6389 - protein, 9 aa, Homo sapien
MLLRLSEPA

SEQ ID NO: 6390 - protein, 9 aa, Homo sapien
MLLRLSEPA

SEQ ID NO: 6391 - protein, 9 aa, Homo sapien
VRSFGTLKK

SEQ ID NO: 6392 - protein, 9 aa, Homo sapien
YPLMLPGCS

SEQ ID NO: 6393 - protein, 9 aa, Homo sapien
VYIRSTDVD

SEQ ID NO: 6394 - protein, 9 aa, Homo sapien
FEPEDTGQR

SEQ ID NO: 6395 - protein, 9 aa, Homo sapien
YDMSLLKNR

SEQ ID NO: 6396 - protein, 9 aa, Homo sapien
YNMSLLKHQ

SEQ ID NO: 6397 - protein, 9 aa, Homo sapien
WVLTAAHCI

SEQ ID NO: 6398 - protein, 9 aa, Homo sapien
WVLTAAHCL

SEQ ID NO: 6399 - protein, 9 aa, Homo sapien
FHPEDTGQV

SEQ ID NO: 6400 - protein, 9 aa, Homo sapien
YETYELVEK

SEQ ID NO: 6401 - protein, 9 aa, Homo sapien
VLLSYPNKT

SEQ ID NO: 6402 - protein, 9 aa, Homo sapien
FPTDPIKES

SEQ ID NO: 6403 - protein, 9 aa, Homo sapien
YDAQKLLEK

SEQ ID NO: 6404 - protein, 9 aa, Homo sapien
FLYNFTQIP

SEQ ID NO: 6405 - protein, 9 aa, Homo sapien
WQPIPVHTV

SEQ ID NO: 6406 - protein, 9 aa, Homo sapien
YKKLIMYSA

SEQ ID NO: 6407 - protein, 9 aa, Homo sapien
WGPEPCALP

SEQ ID NO: 6408 - protein, 9 aa, Homo sapien
WGSEPCALP

SEQ ID NO: 6409 - protein, 9 aa, Homo sapien
ISMKHPQEM

SEQ ID NO: 6410 - protein, 9 aa, Homo sapien
LDELKAENI

SEQ ID NO: 6411 - protein, 9 aa, Homo sapien
WRPRRTILF

SEQ ID NO: 6412 - protein, 9 aa, Homo sapien
YNFTQIPHL

SEQ ID NO: 6413 - protein, 9 aa, Homo sapien
ILYSDPADY

SEQ ID NO: 6414 - protein, 9 aa, Homo sapien
VYTKVVHYR

SEQ ID NO: 6415 - protein, 9 aa, Homo sapien
LQGGVLVNE

SEQ ID NO: 6416 - protein, 9 aa, Homo sapien
MHIHSTNEV

SEQ ID NO: 6417 - protein, 9 aa, Homo sapien
LTVAQVRGG

SEQ ID NO: 6418 - protein, 9 aa, Homo sapien
YDVLLSYPN

SEQ ID NO: 6419 - protein, 9 aa, Homo sapien
LKAENIKKF

SEQ ID NO: 6420 - protein, 9 aa, Homo sapien
YNGLLPPYA

SEQ ID NO: 6421 - protein, 9 aa, Homo sapien
MGGSAPPDS

SEQ ID NO: 6422 - protein, 9 aa, Homo sapien
WLDRSVLAK

SEQ ID NO: 6423 - protein, 9 aa, Homo sapien
WFIKSSNEA

SEQ ID NO: 6424 - protein, 9 aa, Homo sapien
LFGWFIKSS

SEQ ID NO: 6425 - protein, 9 aa, Homo sapien
LSNDMCARA

SEQ ID NO: 6426 - protein, 9 aa, Homo sapien
YKDFIATLG

SEQ ID NO: 6427 - protein, 9 aa, Homo sapien
ISNDVCAQV

SEQ ID NO: 6428 - protein, 9 aa, Homo sapien
YSAHDTTVS

SEQ ID NO: 6429 - protein, 9 aa, Homo sapien
FWLDRSVLA

SEQ ID NO: 6430 - protein, 9 aa, Homo sapien
LPFRNCPRF

SEQ ID NO: 6431 - protein, 9 aa, Homo sapien
LERAFIDPL

SEQ ID NO: 6432 - protein, 9 aa, Homo sapien
LRLSEPAEL

SEQ ID NO: 6433 - protein, 9 aa, Homo sapien
LRLSEPAKI

SEQ ID NO: 6434 - protein, 9 aa, Homo sapien
YASCHLTEL

SEQ ID NO: 6435 - protein, 9 aa, Homo sapien
IPVHPIGYY

SEQ ID NO: 6436 - protein, 9 aa, Homo sapien
WATEDTMTK

SEQ ID NO: 6437 - protein, 9 aa, Homo sapien
VDLHVISND

SEQ ID NO: 6438 - protein, 9 aa, Homo sapien
VSLHLLSND

SEQ ID NO: 6439 - protein, 9 aa, Homo sapien
FDKSNPIVL

SEQ ID NO: 6440 - protein, 9 aa, Homo sapien
ITSWGPEPC

SEQ ID NO: 6441 - protein, 9 aa, Homo sapien
ITSWGSEPC

SEQ ID NO: 6442 - protein, 9 aa, Homo sapien
LSELSLLSL

SEQ ID NO: 6443 - protein, 9 aa, Homo sapien
MNDQLMFLE

SEQ ID NO: 6444 - protein, 9 aa, Homo sapien
LSLLSLYGI

SEQ ID NO: 6445 - protein, 9 aa, Homo sapien
LHGQDLFGI

SEQ ID NO: 6446 - protein, 9 aa, Homo sapien
LSLYGIHKQ

SEQ ID NO: 6447 - protein, 9 aa, Homo sapien
VNYARTEDF

SEQ ID NO: 6448 - protein, 9 aa, Homo sapien
YHLTVAQVR

SEQ ID NO: 6449 - protein, 9 aa, Homo sapien
ISKLGSGND

SEQ ID NO: 6450 - protein, 9 aa, Homo sapien
MTNLAALFP

SEQ ID NO: 6451 - protein, 9 aa, Homo sapien
LKHQSLRPD

SEQ ID NO: 6452 - protein, 9 aa, Homo sapien
LKNRFLRPG

SEQ ID NO: 6453 - protein, 9 aa, Homo sapien
LAALFPPEG

SEQ ID NO: 6454 - protein, 9 aa, Homo sapien
LVLSIALSV

SEQ ID NO: 6455 - protein, 9 aa, Homo sapien
LVHNLTKEL

SEQ ID NO: 6456 - protein, 9 aa, Homo sapien
YKHEQVYIR

SEQ ID NO: 6457 - protein, 9 aa, Homo sapien
LPSWATEDT

SEQ ID NO: 6458 - protein, 9 aa, Homo sapien
LPPYASCHL

SEQ ID NO: 6459 - protein, 9 aa, Homo sapien
LQGITSWGP

SEQ ID NO: 6460 - protein, 9 aa, Homo sapien
LQGITSWGS

SEQ ID NO: 6461 - protein, 9 aa, Homo sapien
LLKHQSLRP

SEQ ID NO: 6462 - protein, 9 aa, Homo sapien
LLWQPIPVH

SEQ ID NO: 6463 - protein, 9 aa, Homo sapien
VLPFDCRDY

SEQ ID NO: 6464 - protein, 9 aa, Homo sapien
LFEPPPPGY

SEQ ID NO: 6465 - protein, 9 aa, Homo sapien
LRVDCTPLM

SEQ ID NO: 6466 - protein, 9 aa, Homo sapien
YFAPGVKSY

SEQ ID NO: 6467 - protein, 9 aa, Homo sapien
LPEKPAVYT

SEQ ID NO: 6468 - protein, 9 aa, Homo sapien
LPERPSLYT

SEQ ID NO: 6469 - protein, 9 aa, Homo sapien
FLRPRSLQC

SEQ ID NO: 6470 - protein, 9 aa, Homo sapien
VSIWNPILL

SEQ ID NO: 6471 - protein, 9 aa, Homo sapien
LYDMSLLKN

SEQ ID NO: 6472 - protein, 9 aa, Homo sapien
LYNMSLLKH

SEQ ID NO: 6473 - protein, 9 aa, Homo sapien
LWQPIPVHT

SEQ ID NO: 6474 - protein, 9 aa, Homo sapien
VHTVPLSED

SEQ ID NO: 6475 - protein, 9 aa, Homo sapien
LQCVDLHVI

SEQ ID NO: 6476 - protein, 9 aa, Homo sapien
LARAASLSL

SEQ ID NO: 6477 - protein, 9 aa, Homo sapien
LPGCSPSCP

SEQ ID NO: 6478 - protein, 9 aa, Homo sapien
WSTECMTTN

SEQ ID NO: 6479 - protein, 9 aa, Homo sapien
MKTYSVSFD

SEQ ID NO: 6480 - protein, 9 aa, Homo sapien
MPEGDLVYV

SEQ ID NO: 6481 - protein, 9 aa, Homo sapien
VTKFMLCAG

SEQ ID NO: 6482 - protein, 9 aa, Homo sapien
LQCVSLHLL

SEQ ID NO: 6483 - protein, 9 aa, Homo sapien
LCAGALVLA

SEQ ID NO: 6484 - protein, 9 aa, Homo sapien
VGPGFTGNF

SEQ ID NO: 6485 - protein, 9 aa, Homo sapien
LMLPGCSPS

SEQ ID NO: 6486 - protein, 9 aa, Homo sapien
VLVNEILNH

SEQ ID NO: 6487 - protein, 9 aa, Homo sapien
VAAFTVQAA

SEQ ID NO: 6488 - protein, 9 aa, Homo sapien
WKEFGLDSV

SEQ ID NO: 6489 - protein, 9 aa, Homo sapien
LGRHNLFEP

SEQ ID NO: 6490 - protein, 9 aa, Homo sapien
IRSTDVDRT

SEQ ID NO: 6491 - protein, 9 aa, Homo sapien
LTAAHCIRN

SEQ ID NO: 6492 - protein, 9 aa, Homo sapien
LTAAHCLKK

SEQ ID NO: 6493 - protein, 9 aa, Homo sapien
IDPLGLPDR

SEQ ID NO: 6494 - protein, 9 aa, Homo sapien
WVFGGIDPQ

SEQ ID NO: 6495 - protein, 9 aa, Homo sapien
MVFELANSI

SEQ ID NO: 6496 - protein, 9 aa, Homo sapien
IYAPSSHNK

SEQ ID NO: 6497 - protein, 9 aa, Homo sapien
IKDTIAANP

SEQ ID NO: 6498 - protein, 9 aa, Homo sapien
IKDTIVANP

SEQ ID NO: 6499 - protein, 9 aa, Homo sapien
IASGRARYT

SEQ ID NO: 6500 - protein, 9 aa, Homo sapien
WLCAGALVL

SEQ ID NO: 6501 - protein, 9 aa, Homo sapien
LYTKVVHYR

SEQ ID NO: 6502 - protein, 9 aa, Homo sapien
YVAAFTVQA

SEQ ID NO: 6503 - protein, 9 aa, Homo sapien
IDTFPTDPI

SEQ ID NO: 6504 - protein, 9 aa, Homo sapien
VSHSFPHPL

SEQ ID NO: 6505 - protein, 9 aa, Homo sapien
VPPFSAFSP

SEQ ID NO: 6506 - protein, 9 aa, Homo sapien
VTEFMLCAG

SEQ ID NO: 6507 - protein, 9 aa, Homo sapien
LMLLRLSEP

SEQ ID NO: 6508 - protein, 9 aa, Homo sapien
LMLLRLSEP

SEQ ID NO: 6509 - protein, 9 aa, Homo sapien
LSVGCTGAV

SEQ ID NO: 6510 - protein, 9 aa, Homo sapien
YDPLYCESV

SEQ ID NO: 6511 - protein, 9 aa, Homo sapien
LLSNDMCAR

SEQ ID NO: 6512 - protein, 9 aa, Homo sapien
LGFLFLLFF

SEQ ID NO: 6513 - protein, 9 aa, Homo sapien
IVLRMMNDQ

SEQ ID NO: 6514 - protein, 9 aa, Homo sapien
WQVLVASRG

SEQ ID NO: 6515 - protein, 9 aa, Homo sapien
VGGWECEKH

SEQ ID NO: 6516 - protein, 9 aa, Homo sapien
VGGWECEKH

SEQ ID NO: 6517 - protein, 9 aa, Homo sapien
LQERGVAYI

SEQ ID NO: 6518 - protein, 9 aa, Homo sapien
VDRTLMSAM

SEQ ID NO: 6519 - protein, 9 aa, Homo sapien
WAEENSRLL

SEQ ID NO: 6520 - protein, 9 aa, Homo sapien
LAHYDVLLS

SEQ ID NO: 6521 - protein, 9 aa, Homo sapien
LLGRHSLFH

SEQ ID NO: 6522 - protein, 9 aa, Homo sapien
FDSLFSAVK

SEQ ID NO: 6523 - protein, 9 aa, Homo sapien
WIGAAPLIL

SEQ ID NO: 6524 - protein, 9 aa, Homo sapien
FGGIDPQSG

SEQ ID NO: 6525 - protein, 9 aa, Homo sapien
VKVMDLPTQ

SEQ ID NO: 6526 - protein, 9 aa, Homo sapien
VKVLGLPTQ

SEQ ID NO: 6527 - protein, 9 aa, Homo sapien
MLCAGLWTG

SEQ ID NO: 6528 - protein, 9 aa, Homo sapien
VPLIQSRIV

SEQ ID NO: 6529 - protein, 9 aa, Homo sapien
FSTQKVKMH

SEQ ID NO: 6530 - protein, 9 aa, Homo sapien
FASWDAEEF

SEQ ID NO: 6531 - protein, 9 aa, Homo sapien
VDCTPLMYS

SEQ ID NO: 6532 - protein, 9 aa, Homo sapien
VTWIGAAPL

SEQ ID NO: 6533 - protein, 9 aa, Homo sapien
FSGYPLYHS

SEQ ID NO: 6534 - protein, 9 aa, Homo sapien
YNVIGTLRG

SEQ ID NO: 6535 - protein, 9 aa, Homo sapien
FEPPPPGYE

SEQ ID NO: 6536 - protein, 9 aa, Homo sapien
LSEDQLLYL

SEQ ID NO: 6537 - protein, 9 aa, Homo sapien
VSFDSLFSA

SEQ ID NO: 6538 - protein, 9 aa, Homo sapien
FTVQAAAET

SEQ ID NO: 6539 - protein, 9 aa, Homo sapien
VRGGMVFEL

SEQ ID NO: 6540 - protein, 9 aa, Homo sapien
YSHGWAHCG

SEQ ID NO: 6541 - protein, 9 aa, Homo sapien
INADSSIEG

SEQ ID NO: 6542 - protein, 9 aa, Homo sapien
YYRNETQHE

SEQ ID NO: 6543 - protein, 9 aa, Homo sapien
LANSIVLPF

SEQ ID NO: 6544 - protein, 9 aa, Homo sapien
VSHSFPHPL

SEQ ID NO: 6545 - protein, 9 aa, Homo sapien
IGYYDAQKL

SEQ ID NO: 6546 - protein, 9 aa, Homo sapien
LGRHSLFHP

SEQ ID NO: 6547 - protein, 9 aa, Homo sapien
FTEIASKFS

SEQ ID NO: 6548 - protein, 9 aa, Homo sapien
LPTQEPALG

SEQ ID NO: 6549 - protein, 9 aa, Homo sapien
MMNDQLMFL

SEQ ID NO: 6550 - protein, 9 aa, Homo sapien
LPTQEPALG

SEQ ID NO: 6551 - protein, 9 aa, Homo sapien
IQSRIVGGW

SEQ ID NO: 6552 - protein, 9 aa, Homo sapien
FSAFSPQGM

SEQ ID NO: 6553 - protein, 9 aa, Homo sapien
IVPPFSAFS

SEQ ID NO: 6554 - protein, 9 aa, Homo sapien
WNPILLWQP

SEQ ID NO: 6555 - protein, 9 aa, Homo sapien
IGAAPLILS

SEQ ID NO: 6556 - protein, 9 aa, Homo sapien
LTLSVTWIG

SEQ ID NO: 6557 - protein, 9 aa, Homo sapien
VLGLPTQEP

SEQ ID NO: 6558 - protein, 9 aa, Homo sapien
VLSIALSVG

SEQ ID NO: 6559 - protein, 9 aa, Homo sapien
FGLDSVELA

SEQ ID NO: 6560 - protein, 9 aa, Homo sapien
LHETDSAVA

SEQ ID NO: 6561 - protein, 9 aa, Homo sapien
ILLWQPIPV

SEQ ID NO: 6562 - protein, 9 aa, Homo sapien
IPVHTVPLS

SEQ ID NO: 6563 - protein, 9 aa, Homo sapien
VLRKYADKI

SEQ ID NO: 6564 - protein, 9 aa, Homo sapien
LFDIESKVD

SEQ ID NO: 6565 - protein, 9 aa, Homo sapien
LYCESVHNF

SEQ ID NO: 6566 - protein, 9 aa, Homo sapien
MFKYHLTVA

SEQ ID NO: 6567 - protein, 9 aa, Homo sapien
VSDIVPPFS

SEQ ID NO: 6568 - protein, 9 aa, Homo sapien
WTKKSPSPE

SEQ ID NO: 6569 - protein, 9 aa, Homo sapien
LIMYSAHDT

SEQ ID NO: 6570 - protein, 9 aa, Homo sapien
LLPPYASCH

SEQ ID NO: 6571 - protein, 9 aa, Homo sapien
MLPGCSPSC

SEQ ID NO: 6572 - protein, 9 aa, Homo sapien
VIYAPSSHN

SEQ ID NO: 6573 - protein, 9 aa, Homo sapien
WIKDTIAAN

SEQ ID NO: 6574 - protein, 9 aa, Homo sapien
WIKDTIVAN

SEQ ID NO: 6575 - protein, 15 aa, Homo sapien
AALFPPEGVSIWNPI

SEQ ID NO: 6576 - protein, 15 aa, Homo sapien
DQLMFLERAFIDPLG

SEQ ID NO: 6577 - protein, 15 aa, Homo sapien
EDFFKLERDMKINCS

SEQ ID NO: 6578 - protein, 15 aa, Homo sapien
EMYYRNETQHEPYPL

SEQ ID NO: 6579 - protein, 15 aa, Homo sapien
FGTLKKEGWRPRRTI

SEQ ID NO: 6580 - protein, 15 aa, Homo sapien
FQELESETLKSEEFQ

SEQ ID NO: 6581 - protein, 15 aa, Homo sapien
GAAVVHEIVRSFGTL

SEQ ID NO: 6582 - protein, 15 aa, Homo sapien
GGVLVNEILNHMKRA

SEQ ID NO: 6583 - protein, 15 aa, Homo sapien
GLQMALDVYNGLLPP

SEQ ID NO: 6584 - protein, 15 aa, Homo sapien
GPVIPQDWSTECMTT

SEQ ID NO: 6585 - protein, 15 aa, Homo sapien
GVILYSDPADYFAPG

SEQ ID NO: 6586 - protein, 15 aa, Homo sapien
HNKYAGESFPGIYDA

SEQ ID NO: 6587 - protein, 15 aa, Homo sapien
HNLFEPEDTGQRVPV

SEQ ID NO: 6588 - protein, 15 aa, Homo sapien
HQSLRPDEDSSHDLM

SEQ ID NO: 6589 - protein, 15 aa, Homo sapien
HSLFHPEDTGQVFQV

SEQ ID NO: 6590 - protein, 15 aa, Homo sapien
IDTFPTDPIKESSWP

SEQ ID NO: 6591 - protein, 15 aa, Homo sapien
ISIINEDGNEIFNTS

SEQ ID NO: 6592 - protein, 15 aa, Homo sapien
KGEYFVEMYYRNETQ

SEQ ID NO: 6593 - protein, 15 aa, Homo sapien
LDELKAENIKKFLYN

SEQ ID NO: 6594 - protein, 15 aa, Homo sapien
LHLLSNDMCARAYSE

SEQ ID NO: 6595 - protein, 15 aa, Homo sapien
LHVISNDVCAQVHPQ

SEQ ID NO: 6596 - protein, 15 aa, Homo sapien
LLFFWLDRSVLAKEL

SEQ ID NO: 6597 - protein, 15 aa, Homo sapien
LTELYFEKGEYFVEM

SEQ ID NO: 6598 - protein, 15 aa, Homo sapien
MWNLLHETDSAVATA

SEQ ID NO: 6599 - protein, 15 aa, Homo sapien
NESYKHEQVYIRSTD

SEQ ID NO: 6600 - protein, 15 aa, Homo sapien
NSRLLQERGVAYINA

SEQ ID NO: 6601 - protein, 15 aa, Homo sapien
NYTLRVDCTPLMYSL

SEQ ID NO: 6602 - protein, 15 aa, Homo sapien
RGAVEPDRYVILGGH

SEQ ID NO: 6603 - protein, 15 aa, Homo sapien
RGGMVFELANSIVLP

SEQ ID NO: 6604 - protein, 15 aa, Homo sapien
SETLKSEEFQKRLHP

SEQ ID NO: 6605 - protein, 15 aa, Homo sapien
TVPLSEDQLLYLPFR

SEQ ID NO: 6606 - protein, 15 aa, Homo sapien
TYSVSFDSLFSAVKN

SEQ ID NO: 6607 - protein, 15 aa, Homo sapien
VAYINADSSIEGNYT

SEQ ID NO: 6608 - protein, 15 aa, Homo sapien
VLRMMNDQLMFLERA

SEQ ID NO: 6609 - protein, 15 aa, Homo sapien
WGSIEPEEFLRPRSL

SEQ ID NO: 6610 - protein, 15 aa, Homo sapien
WGSIEPEEFLTPKKL

SEQ ID NO: 6611 - protein, 15 aa, Homo sapien
WKEFGLDSVELAHYD

SEQ ID NO: 6612 - protein, 15 aa, Homo sapien
YDPLYCESVHNFTLP

SEQ ID NO: 6613 - protein, 15 aa, Homo sapien
YISIINEDGNEIFNT

SEQ ID NO: 6614 - protein, 15 aa, Homo sapien
YRKFLNESYKHEQVY

SEQ ID NO: 6615 - protein, 9 aa, Homo sapien
FPPEGVSIW

SEQ ID NO: 6616 - protein, 9 aa, Homo sapien
MFLERAFID

SEQ ID NO: 6617 - protein, 9 aa, Homo sapien
FKLERDMKI

SEQ ID NO: 6618 - protein, 9 aa, Homo sapien
YRNETQHEP

SEQ ID NO: 6619 - protein, 9 aa, Homo sapien
LKKEGWRPR

SEQ ID NO: 6620 - protein, 9 aa, Homo sapien
LESETLKSE

SEQ ID NO: 6621 - protein, 9 aa, Homo sapien
VVHEIVRSF

SEQ ID NO: 6622 - protein, 9 aa, Homo sapien
LVNEILNHM

SEQ ID NO: 6623 - protein, 9 aa, Homo sapien
MALDVYNGL

SEQ ID NO: 6624 - protein, 9 aa, Homo sapien
IPQDWSTEC

SEQ ID NO: 6625 - protein, 9 aa, Homo sapien
LYSDPADYF

SEQ ID NO: 6626 - protein, 9 aa, Homo sapien
YAGESFPGI

SEQ ID NO: 6627 - protein, 9 aa, Homo sapien
FEPEDTGQR

SEQ ID NO: 6628 - protein, 9 aa, Homo sapien
LRPDEDSSH

SEQ ID NO: 6629 - protein, 9 aa, Homo sapien
FHPEDTGQV

SEQ ID NO: 6630 - protein, 9 aa, Homo sapien
FPTDPIKES

SEQ ID NO: 6631 - protein, 9 aa, Homo sapien
INEDGNEIF

SEQ ID NO: 6632 - protein, 9 aa, Homo sapien
YFVEMYYRN

SEQ ID NO: 6633 - protein, 9 aa, Homo sapien
LKAENIKKF

SEQ ID NO: 6634 - protein, 9 aa, Homo sapien
LSNDMCARA

SEQ ID NO: 6635 - protein, 9 aa, Homo sapien
ISNDVCAQV

SEQ ID NO: 6636 - protein, 9 aa, Homo sapien
FWLDRSVLA

SEQ ID NO: 6637 - protein, 9 aa, Homo sapien
LYFEKGEYF

SEQ ID NO: 6638 - protein, 9 aa, Homo sapien
LLHETDSAV

SEQ ID NO: 6639 - protein, 9 aa, Homo sapien
YKHEQVYIR

SEQ ID NO: 6640 - protein, 9 aa, Homo sapien
LLQERGVAY

SEQ ID NO: 6641 - protein, 9 aa, Homo sapien
LRVDCTPLM

SEQ ID NO: 6642 - protein, 9 aa, Homo sapien
VEPDRYVIL

SEQ ID NO: 6643 - protein, 9 aa, Homo sapien
MVFELANSI

SEQ ID NO: 6644 - protein, 9 aa, Homo sapien
LKSEEFQKR

SEQ ID NO: 6645 - protein, 9 aa, Homo sapien
LSEDQLLYL

SEQ ID NO: 6646 - protein, 9 aa, Homo sapien
VSFDSLFSA

SEQ ID NO: 6647 - protein, 9 aa, Homo sapien
INADSSIEG

SEQ ID NO: 6648 - protein, 9 aa, Homo sapien
MMNDQLMFL

SEQ ID NO: 6649 - protein, 9 aa, Homo sapien
IEPEEFLRP

SEQ ID NO: 6650 - protein, 9 aa, Homo sapien
IEPEEFLTP

SEQ ID NO: 6651 - protein, 9 aa, Homo sapien
FGLDSVELA

SEQ ID NO: 6652 - protein, 9 aa, Homo sapien
LYCESVHNF

SEQ ID NO: 6653 - protein, 9 aa, Homo sapien
IINEDGNEI

SEQ ID NO: 6654 - protein, 9 aa, Homo sapien
FLNESYKHE

SEQ ID NO: 6655 - protein, 15 aa, Homo sapien
AKQIQSQWKEFGLDS

SEQ ID NO: 6656 - protein, 15 aa, Homo sapien
DALFDIESKVDPSKA

SEQ ID NO: 6657 - protein, 15 aa, Homo sapien
DKIYSISMKHPQEMK

SEQ ID NO: 6658 - protein, 15 aa, Homo sapien
DMKINCSGKIVIARY

SEQ ID NO: 6659 - protein, 15 aa, Homo sapien
DPLYCESVHNFTLPS

SEQ ID NO: 6660 - protein, 15 aa, Homo sapien
FFKLERDMKINCSGK

SEQ ID NO: 6661 - protein, 15 aa, Homo sapien
HVIYAPSSHNKYAGE

SEQ ID NO: 6662 - protein, 15 aa, Homo sapien
IYNVIGTLRGAVEPD

SEQ ID NO: 6663 - protein, 15 aa, Homo sapien
KKLIMYSAHDTTVSG

SEQ ID NO: 6664 - protein, 15 aa, Homo sapien
LTQLGMEQHYELGEY

SEQ ID NO: 6665 - protein, 15 aa, Homo sapien
MKAFLDELKAENIKK

SEQ ID NO: 6666 - protein, 15 aa, Homo sapien
PSKAWGEVKRQIYVA

SEQ ID NO: 6667 - protein, 15 aa, Homo sapien
RKFLNESYKHEQVYI

SEQ ID NO: 6668 - protein, 15 aa, Homo sapien
RSVLAKELKFVTLVF

SEQ ID NO: 6669 - protein, 15 aa, Homo sapien
SIVLPFDCRDYAVVL

SEQ ID NO: 6670 - protein, 15 aa, Homo sapien
SNDVCAQVHPQKVTK

SEQ ID NO: 6671 - protein, 15 aa, Homo sapien
TDSAVATARRPRWLC

SEQ ID NO: 6672 - protein, 15 aa, Homo sapien
TECMTTNSHQGTEDS

SEQ ID NO: 6673 - protein, 15 aa, Homo sapien
TEWAEENSRLLQERG

SEQ ID NO: 6674 - protein, 15 aa, Homo sapien
VHNLTKELKSPDEGF

SEQ ID NO: 6675 - protein, 9 aa, Homo sapien
IQSQWKEFG

SEQ ID NO: 6676 - protein, 9 aa, Homo sapien
FDIESKVDP

SEQ ID NO: 6677 - protein, 9 aa, Homo sapien
YSISMKHPQ

SEQ ID NO: 6678 - protein, 9 aa, Homo sapien
INCSGKIVI

SEQ ID NO: 6679 - protein, 9 aa, Homo sapien
YCESVHNFT

SEQ ID NO: 6680 - protein, 9 aa, Homo sapien
LERDMKINC

SEQ ID NO: 6681 - protein, 9 aa, Homo sapien
YAPSSHNKY

SEQ ID NO: 6682 - protein, 9 aa, Homo sapien
VIGTLRGAV

SEQ ID NO: 6683 - protein, 9 aa, Homo sapien
IMYSAHDTT

SEQ ID NO: 6684 - protein, 9 aa, Homo sapien
LGMEQHYEL

SEQ ID NO: 6685 - protein, 9 aa, Homo sapien
FLDELKAEN

SEQ ID NO: 6686 - protein, 9 aa, Homo sapien
AWGEVKRQI

SEQ ID NO: 6687 - protein, 9 aa, Homo sapien
LNESYKHEQ

SEQ ID NO: 6688 - protein, 9 aa, Homo sapien
LAKELKFVT

SEQ ID NO: 6689 - protein, 9 aa, Homo sapien
LPFDCRDYA

SEQ ID NO: 6690 - protein, 9 aa, Homo sapien
VCAQVHPQK

SEQ ID NO: 6691 - protein, 9 aa, Homo sapien
AVATARRPR

SEQ ID NO: 6692 - protein, 9 aa, Homo sapien
MTTNSHQGT

SEQ ID NO: 6693 - protein, 9 aa, Homo sapien
AEENSRLLQ

SEQ ID NO: 6694 - protein, 9 aa, Homo sapien
LTKELKSPD

SEQ ID NO: 6695 - protein, 14 aa, Clostridium tetani
QYIKANSKFIGITE

SEQ ID NO: 6696 - protein, 21 aa, Plasmodium falciparum
  PEPTIDE (1)..(21): cs proteins position 378-398
DIEKKIAKMEKASSVFNVVNS

SEQ ID NO: 6697 - protein, 16 aa, Streptococcus sp.
  MOD_RES (1)..(16): 18kd proteins position 116
GAVDSILGGVATYGAA

SEQ ID NO: 6698 - protein, 13 aa, Artificial Sequence
  Pan-DR binding epitope peptide
  MOD_RES (3)..(3): Xaa=cyclohexylalanine, phenylalanine, or tyrosine
AKXVWANTLKAAA

SEQ ID NO: 6699 - protein, 9 aa, Artificial Sequence
  Standard peptide that binds to HLA A*0101
YLEPAIAKY

SEQ ID NO: 6700 - protein, 10 aa, Artificial Sequence
  Standard peptide that binds to HLA A*0201, HLA A*0202, HLA A*0203, HLAA*0206, HLA A*0207
FLPSDYFPSV

SEQ ID NO: 6701 - protein, 9 aa, Artificial Sequence
  Standard peptide that binds to HLA A*6802
FTQAGYPAL

SEQ ID NO: 6702 - protein, 10 aa, Artificial Sequence
  Standard peptide that binds to HLA A*0301, A*6801,A*3101
KVFPYALINK

SEQ ID NO: 6703 - protein, 9 aa, Artificial Sequence
  Standard peptide that binds to HLA A*1101
AVDLYHFLK

SEQ ID NO: 6704 - protein, 11 aa, Artificial Sequence
  Standard peptide that binds to HLA A*3301
STLPETYVVRR

SEQ ID NO: 6705 - protein, 9 aa, Artificial Sequence
  Standard peptide that binds to HLA A*2401
AYIDNYNKF

SEQ ID NO: 6706 - protein, 9 aa, Artificial Sequence
  Standard peptide that binds to HLA B*0702
APRTLVYLL

SEQ ID NO: 6707 - protein, 9 aa, Artificial Sequence
  Standard peptide that binds to HLA B*3501, B51, B*5301, B*5401
FPFKYAAAF

SEQ ID NO: 6708 - protein, 13 aa, Artificial Sequence
  Standard peptide that binds to HLA DRB1*0101, DRB1*0401
PKYVKQNTLKLAT

SEQ ID NO: 6709 - protein, 12 aa, Artificial Sequence
  Standard peptide that binds to HLA DRB1*0301
YKTIAFDEEARR

SEQ ID NO: 6710 - protein, 14 aa, Artificial Sequence
  Standard peptide that binds to HLA DRB1*0404, DRB1*0405, DRB1*0101
YARFQSQTTLKQKT

SEQ ID NO: 6711 - protein, 14 aa, Artificial Sequence
  Standard peptide that binds to HLA DRB1*0701, DRB1*0802, DRB1*0803, DRB1*0901, DRB1*1101
QYIKANSKFIGITE

SEQ ID NO: 6712 - protein, 15 aa, Artificial Sequence
  Standard peptide that binds to HLA DRB1*1201
EALIHQLKINPYVLS

SEQ ID NO: 6713 - protein, 14 aa, Artificial Sequence
  Standard peptide that binds to HLA DRB1*1302
QYIKANAKFIGITE

SEQ ID NO: 6714 - protein, 24 aa, Artificial Sequence
  Standard peptide that binds to HLA DRB1*1501
GRTQDENPVVHFFKNIVTPRTPPP

SEQ ID NO: 6715 - protein, 13 aa, Artificial Sequence
  Standard peptide that binds to HLA DRB3*0101
NGQIGNDPNRDIL

SEQ ID NO: 6716 - protein, 9 aa, Homo sapien
LLLARAASL

SEQ ID NO: 6717 - protein, 11 aa, Homo sapien
LLLARAASLSL

SEQ ID NO: 6718 - protein, 9 aa, Homo sapien
LLLARAASV

SEQ ID NO: 6719 - protein, 10 aa, Homo sapien
LLARAASLSL

SEQ ID NO: 6720 - protein, 10 aa, Homo sapien
LLARAASLSV

SEQ ID NO: 6721 - protein, 11 aa, Homo sapien
AASLSLGFLFL

SEQ ID NO: 6722 - protein, 10 aa, Homo sapien
SLSLGFLFLL

SEQ ID NO: 6723 - protein, 10 aa, Homo sapien
SLSLGFLFLV

SEQ ID NO: 6724 - protein, 9 aa, Homo sapien
SLSLGFLFV

SEQ ID NO: 6725 - protein, 9 aa, Homo sapien
FLFLLFFWV

SEQ ID NO: 6726 - protein, 11 aa, Homo sapien
FLLFFWLDRSV

SEQ ID NO: 6727 - protein, 10 aa, Homo sapien
LLFFWLDRSV

SEQ ID NO: 6728 - protein, 10 aa, Homo sapien
LTFFWLDRSV

SEQ ID NO: 6729 - protein, 11 aa, Homo sapien
LLFFWLDRSVL

SEQ ID NO: 6730 - protein, 10 aa, Homo sapien
SLLAKELKFV

SEQ ID NO: 6731 - protein, 9 aa, Homo sapien
VLAKELKFV

SEQ ID NO: 6732 - protein, 11 aa, Homo sapien
VLAKELKFVTL

SEQ ID NO: 6733 - protein, 10 aa, Homo sapien
VLAKELKFVV

SEQ ID NO: 6734 - protein, 11 aa, Homo sapien
FLNESYKHEQV

SEQ ID NO: 6735 - protein, 9 aa, Homo sapien
TLMSAMTNL

SEQ ID NO: 6736 - protein, 10 aa, Homo sapien
TLMSAMTNLA

SEQ ID NO: 6737 - protein, 10 aa, Homo sapien
TLMSAMTNLV

SEQ ID NO: 6738 - protein, 9 aa, Homo sapien
TLMSAMTNV

SEQ ID NO: 6739 - protein, 10 aa, Homo sapien
LLALFPPEGV

SEQ ID NO: 6740 - protein, 10 aa, Homo sapien
LVALFPPEGV

SEQ ID NO: 6741 - protein, 10 aa, Homo sapien
ALFPPEGVSI

SEQ ID NO: 6742 - protein, 10 aa, Homo sapien
ALFPPEGVSV

SEQ ID NO: 6743 - protein, 10 aa, Homo sapien
GVSIWNPILV

SEQ ID NO: 6744 - protein, 9 aa, Homo sapien
GVSIWNPIV

SEQ ID NO: 6745 - protein, 10 aa, Homo sapien
PLLLWQPIPV

SEQ ID NO: 6746 - protein, 9 aa, Homo sapien
ILLWQPIPV

SEQ ID NO: 6747 - protein, 9 aa, Homo sapien
ITLWQPIPV

SEQ ID NO: 6748 - protein, 10 aa, Homo sapien
LLWQPIPVHV

SEQ ID NO: 6749 - protein, 10 aa, Homo sapien
GLHGQDLFGI

SEQ ID NO: 6750 - protein, 10 aa, Homo sapien
GLHGQDLFGV

SEQ ID NO: 6751 - protein, 10 aa, Homo sapien
KLRELSELSV

SEQ ID NO: 6752 - protein, 10 aa, Homo sapien
IMYSAHDTTV

SEQ ID NO: 6753 - protein, 10 aa, Homo sapien
ILYSAHDTTV

SEQ ID NO: 6754 - protein, 9 aa, Homo sapien
TVSGLQMAV

SEQ ID NO: 6755 - protein, 9 aa, Homo sapien
ALDVYNGLL

SEQ ID NO: 6756 - protein, 10 aa, Homo sapien
LLPPYASCHV

SEQ ID NO: 6757 - protein, 9 aa, Homo sapien
VLAGGFFLL

SEQ ID NO: 6758 - protein, 9 aa, Homo sapien
VLAGGFFLV

SEQ ID NO: 6759 - protein, 10 aa, Homo sapien
GMPEGDLVYV

SEQ ID NO: 6760 - protein, 10 aa, Homo sapien
GLPEGDLVYV

SEQ ID NO: 6761 - protein, 10 aa, Homo sapien
GTPEGDLVYV

SEQ ID NO: 6762 - protein, 10 aa, Homo sapien
GLPSIPVHPI

SEQ ID NO: 6763 - protein, 10 aa, Homo sapien
GLPSIPVHPV

SEQ ID NO: 6764 - protein, 10 aa, Homo sapien
LLQERGVAYI

SEQ ID NO: 6765 - protein, 9 aa, Homo sapien
LMYSLVHNL

SEQ ID NO: 6766 - protein, 10 aa, Homo sapien
RMMNDQLMFL

SEQ ID NO: 6767 - protein, 9 aa, Homo sapien
MMNDQLMFL

SEQ ID NO: 6768 - protein, 10 aa, Homo sapien
QLMFLERAFI

SEQ ID NO: 6769 - protein, 9 aa, Homo sapien
ALFDIESKV

SEQ ID NO: 6770 - protein, 9 aa, Homo sapien
ATFDIESKV

SEQ ID NO: 6771 - protein, 11 aa, Homo sapien
VVFLTLSVTWI

SEQ ID NO: 6772 - protein, 11 aa, Homo sapien
VVFLTLSVTWV

SEQ ID NO: 6773 - protein, 11 aa, Homo sapien
FLTLSVTWIGV

SEQ ID NO: 6774 - protein, 9 aa, Homo sapien
FLTLSVTWV

SEQ ID NO: 6775 - protein, 9 aa, Homo sapien
TLSVTWIGV

SEQ ID NO: 6776 - protein, 11 aa, Homo sapien
VLVHPQWVLTA

SEQ ID NO: 6777 - protein, 11 aa, Homo sapien
VLVHPQWVLTV

SEQ ID NO: 6778 - protein, 11 aa, Homo sapien
DLMLLRLSEPV

SEQ ID NO: 6779 - protein, 10 aa, Homo sapien
LMLLRLSEPA

SEQ ID NO: 6780 - protein, 10 aa, Homo sapien
LMLLRLSEPV

SEQ ID NO: 6781 - protein, 9 aa, Homo sapien
MLLRLSEPA

SEQ ID NO: 6782 - protein, 9 aa, Homo sapien
MLLRLSEPV

SEQ ID NO: 6783 - protein, 11 aa, Homo sapien
MLLRLSEPAEV

SEQ ID NO: 6784 - protein, 8 aa, Homo sapien
ALGTTCYA

SEQ ID NO: 6785 - protein, 8 aa, Homo sapien
ALGTTCYV

SEQ ID NO: 6786 - protein, 10 aa, Homo sapien
FLTPKKLQCV

SEQ ID NO: 6787 - protein, 9 aa, Homo sapien
KLQCVDLHV

SEQ ID NO: 6788 - protein, 10 aa, Homo sapien
KLQCVDLHVV

SEQ ID NO: 6789 - protein, 9 aa, Homo sapien
KVTKFMLCV

SEQ ID NO: 6790 - protein, 11 aa, Homo sapien
PLVCNGVLQGV

SEQ ID NO: 6791 - protein, 10 aa, Homo sapien
LVCNGVLQGV

SEQ ID NO: 6792 - protein, 9 aa, Homo sapien
LLLSIALSV

SEQ ID NO: 6793 - protein, 11 aa, Homo sapien
ILLSVGCTGAV

SEQ ID NO: 6794 - protein, 11 aa, Homo sapien
ITLSVGCTGAV

SEQ ID NO: 6795 - protein, 10 aa, Homo sapien
ALSVGCTGAV

SEQ ID NO: 6796 - protein, 9 aa, Homo sapien
ALSVGCTGV

SEQ ID NO: 6797 - protein, 10 aa, Homo sapien
SVGCTGAVPV

SEQ ID NO: 6798 - protein, 11 aa, Homo sapien
VLVHPQWVLTA

SEQ ID NO: 6799 - protein, 11 aa, Homo sapien
VLVHPQWVLTV

SEQ ID NO: 6800 - protein, 11 aa, Homo sapien
DLMLLRLSEPV

SEQ ID NO: 6801 - protein, 10 aa, Homo sapien
LMLLRLSEPA

SEQ ID NO: 6802 - protein, 10 aa, Homo sapien
LMLLRLSEPV

SEQ ID NO: 6803 - protein, 9 aa, Homo sapien
MLLRLSEPA

SEQ ID NO: 6804 - protein, 9 aa, Homo sapien
MLLRLSEPV

SEQ ID NO: 6805 - protein, 8 aa, Homo sapien
ALGTTCYA

SEQ ID NO: 6806 - protein, 8 aa, Homo sapien
ALGTTCYV

SEQ ID NO: 6807 - protein, 10 aa, Homo sapien
FLRPRSLQCV

SEQ ID NO: 6808 - protein, 9 aa, Homo sapien
SLQCVSLHL

SEQ ID NO: 6809 - protein, 10 aa, Homo sapien
SLQCVSLHLL

SEQ ID NO: 6810 - protein, 10 aa, Homo sapien
SLQCVSLHLV

SEQ ID NO: 6811 - protein, 9 aa, Homo sapien
SLQCVSLHV

SEQ ID NO: 6812 - protein, 11 aa, Homo sapien
SLHLLSNDMCA

SEQ ID NO: 6813 - protein, 11 aa, Homo sapien
SLHLLSNDMCV

SEQ ID NO: 6814 - protein, 11 aa, Homo sapien
HLLSNDMCARA

SEQ ID NO: 6815 - protein, 11 aa, Homo sapien
HLLSNDMCARV

SEQ ID NO: 6816 - protein, 9 aa, Homo sapien
HLLSNDMCV

SEQ ID NO: 6817 - protein, 10 aa, Homo sapien
LLSNDMCARV

SEQ ID NO: 6818 - protein, 11 aa, Homo sapien
KVTEFMLCAGV

SEQ ID NO: 6819 - protein, 9 aa, Homo sapien
KVTEFMLCV

SEQ ID NO: 6820 - protein, 9 aa, Homo sapien
FMLCAGLWV

SEQ ID NO: 6821 - protein, 11 aa, Homo sapien
PLVCNGVLQGV

SEQ ID NO: 6822 - protein, 10 aa, Homo sapien
LVCNGVLQGV

SEQ ID NO: 6823 - protein, 10 aa, Homo sapien
SLSLGFLFLL

SEQ ID NO: 6824 - protein, 10 aa, Homo sapien
SLSLGFLFLV

SEQ ID NO: 6825 - protein, 10 aa, Homo sapien
LLFFWLDRSV

SEQ ID NO: 6826 - protein, 10 aa, Homo sapien
LTFFWLDRSV

SEQ ID NO: 6827 - protein, 9 aa, Homo sapien
VLAKELKFV

SEQ ID NO: 6828 - protein, 9 aa, Homo sapien
TLMSAMTNL

SEQ ID NO: 6829 - protein, 10 aa, Homo sapien
LLALFPPEGV

SEQ ID NO: 6830 - protein, 10 aa, Homo sapien
ALFPPEGVSV

SEQ ID NO: 6831 - protein, 9 aa, Homo sapien
ILLWQPIPV

SEQ ID NO: 6832 - protein, 9 aa, Homo sapien
ITLWQPIPV

SEQ ID NO: 6833 - protein, 10 aa, Homo sapien
LLWQPIPVHV

SEQ ID NO: 6834 - protein, 10 aa, Homo sapien
GLHGQDLFGI

SEQ ID NO: 6835 - protein, 10 aa, Homo sapien
GLHGQDLFGV

SEQ ID NO: 6836 - protein, 10 aa, Homo sapien
IMYSAHDTTV

SEQ ID NO: 6837 - protein, 10 aa, Homo sapien
LLPPYASCHV

SEQ ID NO: 6838 - protein, 9 aa, Homo sapien
VLAGGFFLL

SEQ ID NO: 6839 - protein, 9 aa, Homo sapien
VLAGGFFLV

SEQ ID NO: 6840 - protein, 10 aa, Homo sapien
GMPEGDLVYV

SEQ ID NO: 6841 - protein, 10 aa, Homo sapien
GLPSIPVHPI

SEQ ID NO: 6842 - protein, 10 aa, Homo sapien
GLPSIPVHPV

SEQ ID NO: 6843 - protein, 10 aa, Homo sapien
LLQERGVAYI

SEQ ID NO: 6844 - protein, 9 aa, Homo sapien
LMYSLVHNL

SEQ ID NO: 6845 - protein, 10 aa, Homo sapien
RMMNDQLMFL

SEQ ID NO: 6846 - protein, 9 aa, Homo sapien
MMNDQLMFL

SEQ ID NO: 6847 - protein, 9 aa, Homo sapien
ALFDIESKV

SEQ ID NO: 6848 - protein, 11 aa, Homo sapien
FLTLSVTWIGV

SEQ ID NO: 6849 - protein, 11 aa, Homo sapien
VLVHPQWVLTV

SEQ ID NO: 6850 - protein, 11 aa, Homo sapien
DLMLLRLSEPV

SEQ ID NO: 6851 - protein, 9 aa, Homo sapien
MLLRLSEPA

SEQ ID NO: 6852 - protein, 9 aa, Homo sapien
MLLRLSEPV

SEQ ID NO: 6853 - protein, 8 aa, Homo sapien
ALGTTCYA

SEQ ID NO: 6854 - protein, 8 aa, Homo sapien
ALGTTCYV

SEQ ID NO: 6855 - protein, 10 aa, Homo sapien
FLTPKKLQCV

SEQ ID NO: 6856 - protein, 9 aa, Homo sapien
KLQCVDLHV

SEQ ID NO: 6857 - protein, 10 aa, Homo sapien
KLQCVDLHVV

SEQ ID NO: 6858 - protein, 11 aa, Homo sapien
PLVCNGVLQGV

SEQ ID NO: 6859 - protein, 9 aa, Homo sapien
LLLSIALSV

SEQ ID NO: 6860 - protein, 10 aa, Homo sapien
ALSVGCTGAV

SEQ ID NO: 6861 - protein, 11 aa, Homo sapien
VLVHPQWVLTV

SEQ ID NO: 6862 - protein, 11 aa, Homo sapien
DLMLLRLSEPV

SEQ ID NO: 6863 - protein, 9 aa, Homo sapien
MLLRLSEPA

SEQ ID NO: 6864 - protein, 9 aa, Homo sapien
MLLRLSEPV

SEQ ID NO: 6865 - protein, 8 aa, Homo sapien
ALGTTCYA

SEQ ID NO: 6866 - protein, 8 aa, Homo sapien
ALGTTCYV

SEQ ID NO: 6867 - protein, 10 aa, Homo sapien
FLRPRSLQCV

SEQ ID NO: 6868 - protein, 11 aa, Homo sapien
SLHLLSNDMCA

SEQ ID NO: 6869 - protein, 11 aa, Homo sapien
PLVCNGVLQGV

SEQ ID NO: 6870 - protein, 10 aa, Homo sapien
LMLLRLSEPA

SEQ ID NO: 6871 - protein, 11 aa, Homo sapien
MLLRLSEPAEL

SEQ ID NO: 6872 - protein, 9 aa, Homo sapien
MLLRLSEPA

SEQ ID NO: 6873 - protein, 8 aa, Homo sapien
ALGTTCYA

SEQ ID NO: 6874 - protein, 10 aa, Homo sapien
FLTPKKLQCV

SEQ ID NO: 6875 - protein, 9 aa, Homo sapien
KLQCVDLHV

SEQ ID NO: 6876 - protein, 11 aa, Homo sapien
LLLARAASLSL

SEQ ID NO: 6877 - protein, 10 aa, Homo sapien
LLFFWLDRSV

SEQ ID NO: 6878 - protein, 9 aa, Homo sapien
VLAKELKFV

SEQ ID NO: 6879 - protein, 11 aa, Homo sapien
FLNESYKHEQV

SEQ ID NO: 6880 - protein, 9 aa, Homo sapien
TLMSAMTNL

SEQ ID NO: 6881 - protein, 9 aa, Homo sapien
ILLWQPIPV

SEQ ID NO: 6882 - protein, 10 aa, Homo sapien
IMYSAHDTTV

SEQ ID NO: 6883 - protein, 9 aa, Homo sapien
ALDVYNGLL

SEQ ID NO: 6884 - protein, 9 aa, Homo sapien
LVLAGGFFL

SEQ ID NO: 6885 - protein, 9 aa, Homo sapien
VLAGGFFLL

SEQ ID NO: 6886 - protein, 10 aa, Homo sapien
GMPEGDLVYV

SEQ ID NO: 6887 - protein, 10 aa, Homo sapien
GLPSIPVHPI

SEQ ID NO: 6888 - protein, 10 aa, Homo sapien
LLQERGVAYI

SEQ ID NO: 6889 - protein, 9 aa, Homo sapien
LMYSLVHNL

SEQ ID NO: 6890 - protein, 10 aa, Homo sapien
RMMNDQLMFL

SEQ ID NO: 6891 - protein, 9 aa, Homo sapien
MMNDQLMFL

SEQ ID NO: 6892 - protein, 10 aa, Homo sapien
QLMFLERAFI

SEQ ID NO: 6893 - protein, 9 aa, Homo sapien
ALFDIESKV

SEQ ID NO: 6894 - protein, 10 aa, Homo sapien
FLRPRSLQCV

SEQ ID NO: 6895 - protein, 11 aa, Homo sapien
SLHLLSNDMCA

SEQ ID NO: 6896 - protein, 9 aa, Homo sapien
LLHETDSAV

SEQ ID NO: 6897 - protein, 10 aa, Homo sapien
ALVLAGGFFL

SEQ ID NO: 6898 - protein, 9 aa, Homo sapien
GLLGSTEWA

SEQ ID NO: 6899 - protein, 10 aa, Homo sapien
KLGSGNDFEV

SEQ ID NO: 6900 - protein, 13 aa, Artificial Sequence
  Pan-DR binding epitope peptide
  MOD_RES (1)..(1): May be either L-alanine or D-alanine
  MOD_RES (3)..(3): Xaa=cyclohexylalanine, phenylalanine, or tyrosine
  MOD_RES (13)..(13): May be either L-alanine or D-alanine
AKXVWANTLKAAA

SEQ ID NO: 6901 - protein, 9 aa, Artificial Sequence
  DR7 preferred motif
  MISC_FEATURE (1)..(1): May be  Met, Phe, Leu, Ile, Val, Trp or Tyr
  MISC_FEATURE (5)..(5): May be any amino acid
  MISC_FEATURE (6)..(6): May be Ile, Val, Met, Ser, Ala, Cys, Thr, Pro or Leu
  MISC_FEATURE (8)..(8): May be any amino acid
  MISC_FEATURE (9)..(9): May be either Ile or Val
XMWAXXMXX

SEQ ID NO: 6902 - protein, 9 aa, Artificial Sequence
  DR7 deleterious motif
  MISC_FEATURE (1)..(1): May be any amino acid
  MISC_FEATURE (3)..(3): May be any amino acid
  MISC_FEATURE (5)..(6): May be any amino acid
  MISC_FEATURE (7)..(7): May be Gly, Arg or Asp
XCXGXXXNG

1-37. (canceled)

38. An isolated peptide comprising an oligopeptide less than 13 amino acids in length;
wherein said oligopeptide is RMMNDQLMFL (SEQ ID NO:862); and
wherein said isolated peptide does not encode a full length protein from prostate specific membrane antigen (PSM).

39. The polypeptide of claim 38, which further comprises a member selected from the group consisting of:
(a) at least one cytotoxic T lymphocyte (CTL) epitope;
(b) at least one helper T lymphocyte (HTL) epitope; and
(c) at least one of the epitopes of Tables VII-XX.

40. The peptide of claim 39, wherein the at least one HTL epitope is a PADRE® epitope.

41. A homopolymer of the peptide of claim 38.

42. A heteropolymer of the peptide of claim 38 and a different peptide.

43. An isolated polynucleotide encoding the peptide of claim 38.

44. A vector comprising the polynucleotide of claim 43.

45. The vector of claim 44, which is a bacterial vector or a viral vector.

46. The vector of claim 44, which is a minigene.

47. A composition comprising the peptide of claim 38 and a pharmaceutical excipient.

48. A composition comprising the peptide of claim 38 and a carrier.

49. A composition comprising the peptide of claim 38 and a lipid.

50. A composition comprising the peptide of claim 38 and one or more other peptides.

51. The composition of claim 50, wherein said peptides are linked by spacer or linker amino acids.

52. The composition of claim 50, wherein said one or more other peptides comprises a member selected from the group consisting of: (a) at least one cytotoxic T-cell (CTL) epitope; and (b) at least one helper T-cell (HTL) epitope.

53. The composition of claim 50, further comprising a member selected from the group consisting of:
(a) a liposome, wherein the epitopes are on or within the liposome; and
(b) an antigen presenting cell, wherein the epitopes are on or within the antigen presenting cell.

54. A method of inducing an immune response against prostate specific membrane antigen (PSM) comprising administering the composition of claim 47.

55. A method of treating and/or preventing cancer comprising administering the composition of claim 47.

56. The method of claim 55, comprising the use of a prime boost protocol, wherein the prime boost protocol comprises administration of a boosting agent.

57. The method of claim 56, wherein the boosting agent comprises the peptide.
